United States Patent Application Publication US 2026/0097106 A1 - sequence listing, part 9

SEQ ID NO: 207 - DNA, 29502 bp, Escherichia coli
  source 1..29502: mol_type = genomic DNA
cgcctcgattgctacatggaggcggggcgcattatagctacttccttgagtttctacatcccccagatcagttttttccgcctaatacacgcagcgtattatcacgaaagcattatagttcatataaaacccatattttacaatgatatatgagcggaattaacgctaccacgatcacataaaacaagaatcataaattaataaccagatatcggaatattcgctctcacagggatggtttacaaaatgcgttatcggtctcagcacccctatagcatcaaggaaaagcagatgaagagtgaagtgttgtccgttaaagagaaaattggttatggcatgggagacgccgccagccacattattttcgataacgtaatgttatatatgatgttcttttataccgatatttttgtcattcctgccggttttgtcggaaccatgtttttggtcgctcgtgcactggatgcgatttccgatccttgcatggggttgttggccgatcgaacgcgctctcgctggggtaaatttcgtccgtgggtactgtttggcgcactgccattcgggatcgtctgtgtactggcctatagcacgccagatctcagtatgaacggcaaaatgatctatgcagcaattacttacaccctacttaccttactttataccgtcgtcaatatcccttactgcgcattgggtggtgtaatcaccaatgacccgactcagcgtatctcgctgcaatcctggcgttttgtgctggcgaccgcgggaggcatgctttctactgttctgatgatgccactggttaatttaattggcggtgataataaaccactcggtttccagggcggtatcgcggtcctttccgtggtggcattcatgatgctggcattttgtttcttcaccactaaagaacgcgttgaagcaccacctacaacaacgtctatgcgggaagatttacgtgatatctggcaaaacgaccagtggcggattgtcggtttactaaccattttcaatatcctggcggtgtgcgtacgcggtggggcgatgatgtattacgtcacatggattttgggcacgccggaagtgtttgtcgcttttctcaccacttattgcgtgggtaacctgattggttccgcactggcaaaacctctgaccgactggaaatgtaaagtcactatcttctggtggacgaacgccctgctggcagtgattagcctcgcgatgttctttgttcccatgcaggccagcatcactatgtttgtcttcatcttcgtgattggtgtgttgcatcaactggtgacacctatccagtgggtaatgatgtccgataccgtcgactacggcgagtggtgcaatggtaaacgcctgaccgggatcagttttgctggcacgctgtttgtgctcaaactggggttggccttcggcggcgctcttatcggctggatgctggcttatggcggatatgatgcggcagaaaaagcgcagaacagcgccacgattagcatcattattgcgctattcacgattgttccggcgatctgttatttgctgagcgcgattatcgctaaacgctactactcactcacgacgcacaatctgaaaaccgttatggaacagctggctcagggtaaacgccgttgccagcaacaattcacctctcaagaagtgcagaactaaggaacggcaatgaaaattagcgatggaaactggttgattcaacctggcctcaatttgattcacccgcttcaggtattcgaggttgaacagcagggtaatgaaatggtggtctatgctgccccccgtgatgtgcgtgaacgtacctggcagcttgatacgcctttatttacgctgcgctttttctccccacaggaaggtattgtcggtgtgcggattgagcattttcagggggcgctgaataacggtcctcattatccgctcaatattttgcaggacgtgaaggtcacaatcgaaaacacagaacgttatgctgagtttaaaagtggcaacttaagcgcgcgtgtcagcaaaggtgagttctggtcactggattttctgcgcaacggcgaacgtattaccggtagtcaggtgaaaaataatggctacgtgcaggacacgaataatcaacgcaattatatgtttgagcggcttgatcttggcgttggcgaaacagtttacggtctgggagagcgctttactgccctggtgcgcaatggccagacggtagagacctggaaccgggacggcggcacaagtactgaacaggcgtataaaaatatcccgttctacatgactaaccgtggttatggggtactggtcaatcatccccagtgtgtctcttttgaagtgggatcggggaaagtctccaaagtgcagttcagcgttgagagtgaatatctcgaatactttgttatcgacggcccgacgtcgaaagcggtacttgatcgttatacccgctttactggtcgtccggcgctgccgcccgcgtggtccttcggcctgtggctaaccacttcatttaccaccaactacgacgaagcgacggtaaacagctttatcgatggtatggcggaacgcaatctgccgctgcatgttttccactttgactgtttctggatgaaagccttccagtggtgcgattttgagtgggacccgctgactttccctgacccggaagggatgatccgccgcctgaaagcgaaagggctgaaaatctgcgtctggattaacccctatatcggtcaaaaatcccccgtctttaaagagttacaagagaaaggctatttactcaaacgcccggacggttcgctatggcagtgggataaatggcagccaggtctggcgatttatgactttaccaatccggatgcttgcaaatggtacgccgacaaactgaaaggtctggtcgcgatgggcgttgattgctttaagaccgactttggcgaacgtatcccaactgatgttcagtggtttgacggttccgatccgcagaaaatgcataaccattatgcgtacatctacaacgaactggtgtggaacgtgctcaaggacaccgttggtgaggaagaagctgtcttgtttgcccgctcggcctccgtcggtgcgcagaaattcccggtacactggggtggcgattgttacgctaactacgaatcaatggcggaaagcctgcgcggtggtttgtctattggcctttcaggttttggcttctggagccacgatatcggcggctttgaaaataccgctccggcacacgtttacaaacgctggtgcgcgtttggtttgctctccagccatagccgtttacatggcagtaaatcttatcgtgtgccgtgggcctatgatgatgagtcctgtgatgtggtgcgcttcttcacgcaactgaaatgccgcatgatgccgtatctgtatcgtgaagctgcgcgtgcaaacgcgcggggtacgccgatgatgcgggccatgatgatggagttcccggacgatccggcttgtgattaccttgaccgtcaatacatgttaggcgacaacgtgatggttgctccggtgttcactgaagcgggcgatgtgcagttctacctgccagaaggtcgctggacacacctgtggcacaacgatgagctcgacggtagtcgctggcataaacagcagcacagcttcctgagtctgcccatttatgtgcgtgataacaccctactggcgctgggcaacaacgatcaacgtcccgattacgcgtggcacgaaggcacggcattccacctctttaatctgcaagacgggcatgaagccgtctgtgaagtgcccgctgctgacggttcggtgatctttactctaaaagcagcacgtactggcaacacgattactgtgactggtgcgggcgaggcgaagaactggacactgtgcctgcgcaatgttgtgaaagtaaatggtctgcaaggcggttcgcaggctgaaagtgagcaggggctggtggtgacgcctcaagggaatgcgctgacaattacgttgtaatctattgaagaatgccgggtacgtctgagtcgtacccggcgagattgatgtttactgcaccggctctgtcgatgtaacttcgctactggaaacgacgcccgcattcatggtttgagtcacttgctgcttttcagcatttacggcgtggagttgcccgttaacggtaggtttcagcgtggcattggcctgaatcgcaccgctggcaaccagttgaatattgccatcgccagttatgggtaactcaggccatccccactgttgcagaatattcaccggaacaccgcgtccgttcagactgatatgggtctgacgttgtggcgtttgggatacgctggcggtggcttccagaatgcctttttcagtaaatgcactcagttcgctgatattcaccgtgctgctgttggcggtcagcgccagcgacgggcgacgaacatcaacacgattgaatgtcgcggcggcggcattcagattcgccgagccactccagacgccccatttatgatcggtaaccagcgtcaggttggcaccgtaaccatcgagcgcggtgagctgccacgggaagtcagggtcgatatcaatgatcagattgcggctggcgctaaatctcttcagttgcaggctgtttaaccaaccgggtgtcgtttccatccacaactgttgccagtttttcggcaaggtatattccagcccggcaattgccgcatcatcaaggatcaacgttttcccgtcacgcagccagttccctgacgttctgaccatacccccttcccagcggctggtgaactggcgcagcgctacgccctgcggggaaaattccgcgtttataatcgggtcaaataaatgcagcgaaccataaatgaactcgctagcgttcatcgacagtttgccttcctgtgtctgccagtcatctttactgaaggtcatgttgcgcaagctgagatcgaggtcggtcaccgcccagtccggaccttgcaaacgagcatcgatcacttccaggcgaccaatctgcaacgacgggacagagcgtaatggcgcaaagaagtcggttagcgatttttcgctttgtagacgtatatccgccatgcgcaggttttccacttgccagctgccgtcggcgttacgctgcgcgtttccggttaatgtcccgcgggcgatgtcggcacccaggttagtcagcgtaacgcgatcattatcaatactgccttcaatcagtacattggtggcaggaacatcattgagcgaaagcgatccggcactaaactgaatctgcgccttcgtacccagcactttaccggcttctggtgaccacggaaccacgccgccatttacccgctgcgcgctcagtttccattcgctattcgggctattaaacgccatatcacgcagttgcagacgatcggctttgaacggtagcggcgcggtctggtcggtgagattcagcgtcccgttttccagcaggatggtatcgacatggcgtggttcggtcagttgccgactgcttagcgcaatgtcgacactttttgccaccagggtcgcgggctgaccatcacgaccaaacgtgacgttctccagcacgatatgagatggcgcggaaaaacggtgatccatcgccccgaaggccagatgatagtcgctattctcggaaacccatgcgctgatatgttctgctccccagcgggtttgcagaagaaaatagaggccagcgatcaccactaacagagcgatgagaatgtagagaagcagcttcccaataaatttcatggtcttccatcccgtgaaatgcacataagggagttatgcacgatttacgcgcaatcctcaaggcgggaatggtgaaagaggtgagactgcggcggtaattatcttaccgccgccagtgaattactgtttttctggtgggaaaatcagattcagcacgatggcagtaataccgcccgcggcgatcccggaggagagcaggtttttcagccattcaggggcaaactgcaaaatcagcggctgctgagacacgcccagaccaaccgccagcgacagcgcgataatcagaatcgcccgacggttcagcggctcacgagaaacgatacgcacaccggaggcggcgatggtgccaaacattacaagcgttgcgccgcccagaaccggttctggaatgtgttgtacaaaaccgctcactgccgggaacagacccagcacgatcaacatcagcgcgacgacaaaaccgacatagcggctggcaacaccagtcaactggatcactccgttgttttgcccgaagcaggagttcgggaaggtgttaaacaccgccgaaacaaacgagttcaggccgtttgccagcacgccgcctttcaggcgtttcatgtacagcggaccggacactggctgttcggaaacgtcagaggtcgccgtgatatcgccaatggtttccagcgaagtgatcataaagaccagcatcagcggcagcagcagactccattcaatgccaagaccgtaatagagcggcgttggcaccataatcagttcttgcgtcatcggttcgttgctttctggcaacatgcccataaaccacgccagcgcatatccggccgccatcgcaatcaccagtgaggccacgcgtaagtaagggttacgttgannnnnnnnnnaggataattaaggctaagaccacgcctgccagcagcagatttttcggtgcgccgaaggtgttatcgctcatggctgcgtaaccgccgccaatggacgttaacccaacctgaattagcgacaggccgataatcatcaccacaacgccagaaaccagcggcgtaataatgcggcgcgccagatgcagaacgcgggagagcaccatctcggtgcaacttgccagcatcaacgtgccgaacaaagccgccatcatggtaggaacatcagcaccaccggttttcagcgcggtaccgcccataatcagcggggcaacaaagttgaagctggtgccctgaatagacaacagcccggagccaaccggaccccaggccttaatttgaataatcgatgccacaccggaggcaaacagcgacatactaataatgtgttgcgtgtcttgtgccggtaaacccagcgcctggcagattaatagcgctggcgtgatcaccgcaacgaacatcgccagcagatgctgacaggcggcaaacagggtttgaggaagcggcggacgatcttcaagacggtaaatcagttcgctgttttgagtctgcgcaaccggttgcgcattttctgactcgagggtggaaacagacatcgaaaacaatcccgtggtagcaaagcgggcattttagctgaccgaaagagaaaagcaaacgtttgccacatcctcatctaaatatttaaatgagataaatgcacttttttatataacttttggtatttttctgcttaaaatccatgccatttgttcattaacagctgagaatttgacccaggaaagcataactcgatacccgtcatagttcatgaagttgccactgcgcgatgaagtatgacgagtatgaaagagtgatgcggatacaaaggagtaactatgtttcatctcgatactttagcaacgcttgttgccgcaacgctgacgttgctgctcgggcgtaagttggtccattccgtctcctttttgaagaaatacaccataccggaacctgttgcgggtggtttgttggtggcgctggcgctactagtactgaaaaaaagcatgggctgggaagtcaactttgatatgtccctgcgcgatccgttaatgctggctttcttcgccaccattggcctgaacgccaacattgccagtttgcgtgccggtgggcgtgtggttggcatcttcttgattgtggttgttggtctgttggtgatgcaaaatgccattggcattggtatggctagcctgttagggcttgatccgctgatggggctgttggccggttctattacgctttccggcggtcacggtacgggcgctgcgtggagtaaattgttcattgaacgttatggcttcaccaatgcgacggaagtggcgatggcctgtgcaacgttcggtctggtgctgggcggcttgattggcggtccggtggcgcgctatctggtgaaacactccaccacgccgaacggtattccggatgaccaggaagtcccgacggcgtttgaaaagccggatgtgggccgcatgatcacctcgctggtgctgattgaaactatcgcgctgattgctatctgcctgacggtggggaaaattgttgcgcaacttttggctggcactgcttttgaactgccgaccttcgtctgtgtcctgtttgttggcgtgattctgagcaacggtctgtcaatgatgggcttttaccgcgtctttgagcgtgcggtatccgtgctgggtaacgtaagcctgtcgttgttcctggcgatggcgctgatggggctgaaactgtgggagctggcttcgctggcgctgccgctgctggcgattctggtggtacagaccatcttcatggcgttgtatgccatcnnnnnnnnnntcgttacctggcgcatgatgggcaaaaactacgatgcggcagtgctggctgcgggtcactgtggttttggcctcggtgcaacgccaacggcaatcgccaacatgcaggcgatcactgaacgctttggcccgtcgcacatggcgtttttggtggtgccgatggtcggtgcgttctttatcgatatcgtcaatgcgctggtgattaagctgtatttaatgttgccgatttttgccggttaaaaatgaaaaagcgtcggaaggaaccggaaacgctacgtgaacactgtcgccatatttttggtgatgagccgccagtgctctgtgtatgggaaacggaatttgattacgcagatgccgaactcaaggcgctggcggctaaagagtggcagcagatcagcgaatgggatttgagtgcttactatgtactcaatctcgtttataacgaaccgatgcaaatagagttgtttcgctatctgtttccgctctgcctggcgcaatggcatgaaaccgttttagctggcggttatggtgatcacttcgaagaatccttaatgaaggcattgtgtcggccctatctctggcaggagatgatgaatgcttcccaacgccagcaggtacggcaatttttactggacaccgcgttgcagcgtatggataacgagcgtggtttcaataacgttctttgctggctggcggtgttcaatactctgggtggggccgcgccgttaattcgttctctctggtcgcgctggtgggcgctggatacgccaggaaaagcggtgtgtgctattcagtatgccgcgcatctaatttatcccatagaagccaatccgttatggtcgcaagaatggataggctgggggcatccattaggccataaagatggctggtcctctgataatcgcgcttttcttcgccaaatgttaacacctgaaatgattgtggctggcgtacaggcagcggctgaaattctgcgtggtgaaccggaaggcgcaatggcggcgcgaattgcacaggatgcgtatgaggcaatggatatcctcactatccagattgaagatttactgcgtgacttgtcttgtgatgagtctggtcatgcgttggagtaacgttccgtctccggcatccagcgttctatcagggcttttgcttgttgtgggtaacgttcgtgaatatgtcgcgccaggcgctgaacttccgggatcatcgcctgatcgcgcagtaaatccgccactttaaattcagcattacccgtctgacgcgtgcctaacaattcgccagggccgcgaatctccagatctttttgcgcaatcacaaaaccgtcgttactgtcgcgcagcacttgcaggcgaatttgcgccgttttggagagcggcgttttgtagagcagcacgcagtgagaagccaccgcgccacgacctacgcgcccgcgcagctggtgtaactgcgctagacccagacgctcagggttttcgataatcatcagactggcgttaggcacatcaacgccgacttcaataacggtagtggcaaccagcagttgtagctcaccttgtttaaacgacgccatcaccgcctgtttctcggctggtttcatccgcccgtgtaccaggccaacattcaattctggtagcgccagtttcaactcttcccaggtagcttccgccgcctgcgcttccagtaactctgactcttcaatcaacgtacaaacccagtacgcctgacgaccttcagtcatgcaggcgtggcgcacgcggtcaatgatgtcggtacggcgggtatcaggaatagcgaccgtagtcactggcgtgcggcctggcggcagctcatctatcaccgaggtatcgagatcggcatacgccgtcattgccagcgtgcgggggatcggcgtggcggtcatgatcaactgatgcggatggaagccctgctgctggcctttctcccacaatgccagacgctgatgcacgccaaaacgatgctgttcgtcgataatcaccagcgccagaccgttaaactgcacctgttcctggaagatggcgtgtgtaccgacaatcatctgcacctgaccgctggcgatggcttcctgctgtgccagtcgcgctttacctttctgcttaccggcgagccagcccacttcgataccgagcggtgcaaaccagttgcggaagttattggcgtgctgctcggcgagtaattcggttggtgccatcagggccacctgtttgccgtgggcaatcgcacgcagcgcggcgagggcggcgaccagtgttttaccggaacctacatcgccctgcaccaggcgcatcattggaacatccagcgccatatcatgctcgatctccgccactacgcgtgcctgtgcgcccgttggcttgaacggtaaggcggcgaggagtttatttttcagcgcgtcattggcgctcagcggctgggcatgaaaacgctgtgctccggcacgtaaggctaacatgctgaggttgtgcgccagcagttcttccagaatcagacgacgttgcgccggatgctgcccggtttccagatcgctaagctgtagcgtcggcggcgggcggtgcaaagtgcgcaacgcttccggtagcgtcatcattccttgtgacagttccggcggcaggagttcttcaatggcgcaggtgtcgagcagatccagcgcctggtcggttaatttacgcagcgtggcctgctttacgccttccgttgttggataaaccggcgtgagcgtttcctgtaattctggcgtgctgagatcgccctgcacgcggtattccgggtggatcatctccgcaccatatttaccgcgctttgcttcgccataagccagtacacggcggcccgtcgccaggctatttttcattgccgcgctgaaattgaaaaagcgcatggtgaggatgccggaaccgtcgctgatctggcaggtcatcatccgccgaccgccgaaggagatattgcagttcagcacttcgccttccaccgtggcataaacgcccggcagtagttctccgatggggtagagatgggtgcgatcttcgtagcgcaggggaaggtgtaagagtagatcctgcacggtatgcaggttgattttcgccagtttgttactaagtgctgcgccaacgcccgttagggaactgagtgggacagcatctaacaggcgacctttcatggcacttaccctgcagcctgcatagtagcccaccagtcggcatcagcttcgatctcgccttgctgattgacgtggggataaggcaggcctttgcgttttgcgactttcgccagcaccggatagccgccttcaaacaacaggcgttgttgctctgcttccggcaacatgctgttttcacgcaggtacatgcctgcattttgccgctgacgctgggcttcgtaaagaatgagggctgaggcaacggaaacattcagcgactgcaccatgccgatcatcggaatgatgatgtcctgatccgccagggccaatgcttcctgcgtgatgcccgttttctcctgtcccatcaaaatgcaggtcgggcgagtgtaatcaatttcgcggaaatcgacagcgttatcagaaagatgggttgccagaatctgcatgccctggcctttgagatgagcgacggcatcgccaatggtgcggtgtgttttcacctgtacccagctgttactacccgccgctgccgaagccatggtgcgcatgcggctaccaggccagacggcgtgaacttcatgtacgccaacggcatctgcggtacgaataatcgcagaaacgttatgaggtttgtggacctgctccatgcagacggtcagatcaggctgccgcctggcgagcatttcgcagatgcgtgcataacgtgttgggttcataaaacattaatttcggtttcgggtgactttaatcacgtctggcatcacgcggattttgcgcatgatattcgccagatgcacacggtcacgggcggtcagacgaataaaggcgctgtagacgcgaccatctttctcttccgtattcaaactttgaatattcgaagtcgtggtgttaattgccgccgtcaggtttgccagcgcgccctgatgattgaacatctccaccttgatttcggtgatgaactcctgcgccgtctctttatcccattccacagccataaacttctctggctctttctggtagccacggatattacggcaggattcatggtggatcaccagacctttaccggggctgacgtgggcgataatcgggtcgccaggaatagggcggcagcatttcgcaaaggtgatcagcacgccatcggcacctttaatgggcagatgtccgtggctttgggttgccggtggaatggaggcgtccccatgttgcagatttttcgcgaccaccacgctcattgcgttaccaagtccgatttctgccagcagatcgtcaagcgttgccagcttcatgcgatccagctcgcgctgaatattttcctgcgggatttcattcagctnnnnnnnnnngacgacggcccaggcttacagaatcatcacgcttgaggtttttcagcaactgacgaattttggcgcgcgcttttgagctaacgacaaagttcagccacgcggcattcgggcgagcgcccggtgcggtaatgatttcaacggtttgaccgctggtaagcggctgcgacagcgggtaaggctggcggtcaacgcgtgcgcccacgcaggcatgaccgatatcggtatgcactgcataagcgaagtcgacgggcgttgcaccggcaggcagctcgacaattcgcccttccggtgtgaaaacgtaaatctcatccgggaagagatcggatttaacgctctcgataaattcaaacgaactaccggcgctctgttgcagctccagcaggctttgcatccagcgctgggcgcggatttgcgcggtggtgctggtttcgccgtgctctttataagcccagtgcgcggcaacacccatctccgccatctgatccatatcttcggtacggatctggacctcaaccggcacaccgtgcgggccgatcatcgaggtgtgcaaagactgatagccgttcgcttttggaatggcgatgtagtctttcacgcgacccggacgcggcttgtacaggctatgcatttgcccgagcacgcgataacaggtgtcagaatcattgacgatcacgcggaaagcgtagatgtccatgattgagtgaaaacgctgctctttgagcaccattttgcagtaaatcgaataaagatgcttttcgcgaccactgacgcggcacggtattcccgcttcctgcaaacgcccttcgatttcagagaggattttttggatcatctctttacggttgccgcgcgcggctttcaccacttctttaattacgcggtaacgattgggatacagcgcctcaaaacccagctcttcgagttcggttttaatgtggtggatacctaaacggtgcgccagcgggctataaatttcgagagtttcacgggcgatgcggcgacgtttgtccgggcgaagtgagcccagcgtgcgcatgttgtgggtacggtcggcaagtttgatgaggatgacgcggatatcctgcaccatcgccataatcatcttgcgaaagttttcggcctgcgcctctttcttatcgcggaacttgagtttatcaagtttcgacaccccctctaccagctcggcgacgcttttaccaaaaagctgttccatatcctggtaggtggcgggagtatcttcaatcacgtcatgcagcagcgccgccatcagcgtttcatagtcgagtttcatctcggccagaatgcaggcaaccgctaccgggtgcgtgatatagggttcaccgcttgaacgtgtttgcccctcgtgagcatcacgtgcaacgagatacgcctgccgcagacgcttgatttggtcttccggcaggtaggtttgaatcagttgattcaggctttcaaacagatacaagggcgacccgctttgtgattaacgacgaccttcagcaatagcggtaacggcttgtaattcagcggcttcctgctcttgctgttcctggcgttcgcgaacgtcgaggatctggttgttgatcagaccttcttcgatttcgcgcagcgcgattacagtggttttatcgttttcttccggtaccagcggatcctttccgcctacctgcatctgacgagcgcgacgcgcggcgaccagtaccaggtcaaaacggttaccaattttctctacagcgtcctgaacagttacgcgtgccatacttaaaaagctccacaggtgaagaaatgactgggcatgatactgaaatcaggttcagtctgccaacaatttgctgattaaagcgtcatgacgctgcttttggcggctcatgcgcagacgttcggcgcgaataatggtcttcaaatcggtcaacgcggtatcgaagtcatcattcacaatcagataatcatattcggcgtaatggctcatttctgcaacagcttgcgccatacgctttgcaatgacctcttcgctgtcctgaccgcgaccgcgtagacggcggtccagttcaattttggacggcggtaaaataaagatactccgcgcgtgcggcatcttctggcgaatttgctgcgcaccctgccagtcgatatcgagaaaaacatcgacaccggtcgccagtacttgctcaatggcctcacgcgaagtgccatagtaattaccaaaaacttctgcgtgttcgaggaacgcatctctgctaatcatttctttaaattcatcatgattaacaaagaaataatgttcaccgtggacttcaccaggacgcggttggcgtgtggtgtgtgaaacagaaacctgggtgtcatacaacggttgggtttttaataaagcctgaatcaggctggatttacccgcgccactgggggcagaaacaatataaagcgtgccttgagccatgagtatctttcgtatgtgattagcgaaataaagcctacatacgagcttattatacacggcgcggccatgtgacgtagcccttgctcacactttttgcgcaaagttgttgcgttttgcgtagctgtttccgcatttgcctgtgatttactgcaataaagacgattctcaggaagcgtcctcgcagactccgtttttgccactcggctttgccttcaccacgttgtatatctgccagcctgactacagcggaggtgaagatgaaagtatggatggcgatattaataagtatcttgtgctggcaatcatctgtgtgggcggtctgtccggcctggtcgccagccagagcacaggaagaaatttcccgcctgcaacagcaaataaaacagtgggacgatgactactggaaggaaaaagtgaggtggaagacggtgtttacgatcagttaagcgcccgtcttacgcagtggcaacgctgctttgggagcgagccccgcgacgtgatgatgccgcctttaaatggtgcggttatgcatccggttgcccatacgggtgtacgcaaaatggtggataaaaacgcattaagtctgtggatgcgagaacgtagcgatctttgggtgcagccaaaagttgatggcgttgcggtaaccctggtttatcgggacgggaaactgaacaaagcaatcagtcgcggtaatggcctgaaaggcgaggactggacgcagaaagttagcttaatttccgctgtgccgcaaaccgttagcgggcctttagccaacagtacgcttcagggggaaatatttctccagcgcgaggggcatatccaacaacaaatggggggaataaatgcccgcgcaaaagttgctggcttgatgatgcgccaggacgatagcgacacgctgaattctctgggcgtttttgtctgggcatggccggatggaccgcagttaatgtctgatcgtttaaaagagctggctaccgcaggttttactctaacgcagacgtatacccgtgcggtgaaaaatgctgatgaagttgcgcgcgtacgcaatgagtggtggaaagcggaattacccttcgtcaccgatggcgtagttgtgcgaggggcgaaagaacccgaatcccgccattggctaccaggccaggcagaatggctggtggcctggaaatatcaacctgtagctcaggttgccgaagtgaaggcgattcagtttgcggtgggtaagagcggtaaaatatcggtggttgcgtcactcgcacctgtcatgctggatgataaaaaagtccagcgggtgaatattggttccgtcaggcgctggcaggagtgggatattgcgcctggtgatcagatcctcgtcagccttgccggtcagggtattcctcgcattgatgatgtggtctggcgcggtgcagaacgtacaaaaccgacaccaccagaaaaccgctttaactcgttgacctgctactttgcttctgatgtttgtcaggaacagttcatttcacgcttagtctggctggggtcaaaacaggttctggggctggatggcattggtgaggccggctggcgcgcgctgcatcagactcatcgctttgagcatatcttttcctggcttttattaacgccagagcaattacagaacacgccggggatcgcgaaaagtaaaagtgcgcagctatggcatcagtttaatctggctcgtaagcagccttttactcgctgggtgatggcaatgggaataccgctaacccgggcggcgcttaatgccagtgatgaacggtcctggtcgcaacttttatttagcacggagcagttctggcagcagctgccggggactggatcggggcgcgccagacaggttattgaatggaaggaaaatgcgcaaatcaagaagctgggcagttggctggctgcccagcagatcacaggttttgaaccttagtgtccttcgtggctgtagtaaaagaccggtaatcccagcttaaggcgtagcgccagtaagcgggcaaaaaagccgaataccagggtggagataattaccacatcatggttagaaacatagtgttgcagcgcgatgtacagcacggcggaggcaaatgagacaccggcatacaactctttctggaataccagtgggatacgtttacagaacatatcgcgcaaaacgccgccaaacacgccggtggttaccgccgcgacaacggcaataattgggccgtgccccatatccagtgcaacctgtgcgccgatgatagaaaagaccaccagtccaagcgcatcgagcaccagaaacactttgcgcaggtaaggcattacaggagcaacgatagtggtgagtactgcggcggtagcgacgataatcacatattccgggtgtttgacccagccgagcggatagtggcccagcagaatatcgcgcactgaccctccgccaattgcggtggcggtcgcaataataattacgccaaatgtatccatgcggcgtcgcccggccgccagagcccccgtcatggcttcggcagtaatgccaaccaaatacaaaatgtgtaacagcatggttctctccctaaaaatctgtctggcagggtagcgatttgtgcgtattgtcacgattgagattttttaaggtgagaggaaattgataacttgtagttatgtgaaatcgctattttctgtagcgtagatgcattcttctgacttcttgtctgagaaaatgcataagaaaaaataggttaaaactgaggggggaaaagaaaggtgcaatgtttagccattgtgttcactgcacctggaccttggcttacgcatcgggtgtctcaatcaacaaaaagagtttttcgtttctgctatttcttctctgtaatttttacactgttttccaactgcttgatgctgacctgcggggtcggcaactcctcaggcatggttccgccaagttcctgaatggtttgcctcaccttgctacccacgtcaaagtgtgtggtattagcttgctgtgctgcctcaaccaattgtttgttatgttctttcaactcatttctcagaaacagacgcttttcgtcttcacgaagttgcttaaatgcttcatcgtcagcaagctcctgccgtcgggtctggatagcaaaataagtctgccctgccgcaatgaccggtttcgcggggtcgccgttttgtactaccaggtaacaggcatagcgggagagtacgatgtcttttaatgctcttttggcatttgagccaattttgaccatatcgaggatctcctcgaaatggtcatcaattgtgtgaccactgttctcacaggcctctttggcgcgcgttaatacaggtataaagtgacgatactctgaataacccagtagtttcccaagttgtcttgctgaccattgttctgctccgtttgcattaatcagttttatctcttcaaaaggttgatgatgttcgttcattgcccactccatgtgatatcgattgcaaagaaagtaaatctgtaactgtatttatatacagttgtgagtatctcacgttctcagtgtgctgggcaaaaaaacatcgcaaaatctggagcaggcacgcaaaacagaattgaagttgcggggaagaaaaatgccgctctgtttgagtgggcggcatttgtgaaggctgaaaagtaagaattagtgttacgagttactcaatattctgaatctgctcgcgcatctgctcaatcaacactttcagctcgatggcggagtttgtcacttcggcattgatagatttcgacgcaagagtgttcgactcgcggttgaattcctgcatcataaagtccagacgacgaccaacggcttcttttttcttcagaatgttgtaggtctctttgacatgcgcttccaggcggtccagttcttcggcaacgtcaattcgttgtgccagcagaaccaactcctgctccagacggttgttttccaactgaacctgagcatcttccagcttcgcgaccagacgctcacgctgccattgcaggatttccggcatatgggcgcggactttgaccacttcggcggtgacgccttccagacgctgctcgatcaatgctttcagcgcctgaccttcggtttcgcgcgcgacgataaagtcgtccagggtaccatccaacgccgcgagaatttcagcggcaatcgcgtcgagatcctgctcctgggctgccatcacgcccggccagcgtagaatatcaaccgggttgatttccccttcgtcactctgcatttttacccagttcgcggcagttaccagctgtttagccagtttttcgttgaggatcagctcaccttgtgcgctaacatctggctcatagcgcagggtacattccactttaccgcgcgtcaggcgagaacgaatacgctcgcgaacgacaggttcaaggctacggaactgctccggcagacgaaagtaagtttccagataacgctggtttaccgagcgcatttcccaggttgcgctcccccattcacccttgatttcacgccgggcgtaggcggtcatactgcggatcatagacgttcctgtttataaaaggagaggtgggaggattatagccatcgatgccttgtcaggataggaataaccgccggaagtccgtataatgcgcagccacatttgtttcaagccggagatttcaatatgcgtccagcaggccgtagcaataatcaggtgcgtcccgttaccctgactcgtaactatacaaaacatgcagaaggctcggtgctggtcgaatttggcgataccaaagtgttgtgtaccgcctctattgaagaaggcgtgccgcgcttcctgaaaggtcagggccagggctggatcaccgcagagtacggtatgctgccgcgttctacccacacccgtaacgctcgtgaagcagcgaaaggtaagcagggtggacgcacaatggaaatccagcgtctgatcgcccgtgcacttcgcgcggcagtagatttgaaagcgctgggtgagttcaccattacgctggactgcgacgtgcttcaggctgatggtggcacgcgtaccgcttcgattacgggtgcctgtgtggcgctggcagatgcgctacagaagctggtggaaaacggcaagctgaaaaccaatccaatgaaagggatggtagccgcggtttctgtcggtattgtaaacggtgaagcaatttgcgatctggaatacgttgaagactcagccgcagagaccgacatgaacgtagtgatgaccgaagacgggcgcattattgaagtgcaggggacggcagaaggcgagccgttcacccatgaagagttactcaccttgttggcgctggcccgagggggaatcgaatccattgtagcgacgcagaaggcggcgctggcaaactgatttttaaggcgactgatgagtcgccttttttttgtctgtagaaaagtaagatgaggagcgaaggcatgaaaccatatcagcgccagtttattgaatttgcgcttagcaagcaggtgttaaagtttggcgagtttacgttgaagtccgggcgcaaaagcccctatttcttcaacgccgggctgtttaataccgggcgcgatctggcactgttaggccgtttttacgctgaagcgttggtggattccggcattgagttcgatctgctgtttggccctgcttacaaagggatcccgattgccaccacaaccgccgtggcgctggcggagcatcatgacctggacctgccgtactgctttaaccgcaaagaagcaaaagatcacggtgaaggcggcaatctggttggtagcgcgttacaaggacgcgtaatgctggtagatgatgtgatcaccgccggaacggcgattcgtgagtcgatggaaattattcaggccaatggcgcgacgcttgctggcgtgttgatttcgctcgatcgtcaggaacgggggcgcggcgagatttcggcgattcaggaagttgagcgtgattacaactgcaaagtgatctctatcatcaccctgaaagacctgattgcttacctggaagagaagccggaaatggcggaacatctggcggcggttaaggcctatcgcgaagagttcggcgtttaaaaatatgcgctgtgcagggtttttgctgtgcgcagcgtgatgcgcttcaagatatcgtgttaatctgctttcgccagcagtggcaatagcgtttccggccttttgtgccgggagggtcggcgagtcgctgacttaacgccagtagtatgtccatatacccaaagtcgcttcattgtacctgagtacgcttcgcgtacgtcgcgctgacgcgctcagtacagttacgcgccttcgggatggtttaatggtattgccgctgttggcgcctcttttggccgccgtgatgtggagagtggaatggatgctacccggacaacccttctggcgctcgatttgttcggctcgccgggctggagcgccgataaagaaatacagcgactgcatgcgctcagtaatcatgccggacgccattaccgacgcattattctttctaaacgccacggtggtcagcggctggtgttagcccctgattacttgctcaaaaccgtacagcgcaacattcttaagaacgtcctttcacaatttccgctttccccttttgctacagcctaccgaccaggttgcccaatcgtcagcaacgcgcagccacactgccaacagccgcagatcctgaaactcgatatcgaaaactttttcgatagcattagctggttacaggtctggcgtgtgtttcgccaggcccagttgccacgtaatgtggtaaccatgctgacctggatttgttgttataacgacgcgttaccgcagggggcaccaacttcgccagccatttccaatcttgtgatgcgccgttttgatgaacgcataggggaatggtgtcaggctcggggaattacctacacccgctactgcgatgacatgaccttttcaggtcacttcaatgcccgccaggttaaaaataaagtgtgcggattgttagcggagctgggcctgagcctcaataaacgcaaaggctgcctgatagctgcctgtaagcgccagcaagtaaccgggattgttgttaatcacaagccacagcttgcccgtgaagcgcgccgggcgctgcgtcaggaggtgcatttgtgccaaaaatatggcgttatttcgcatcttagtcatcgtggtgaacttgatccttctggcgatctccacgcacaggcaacggcgtatctttatgctttgcagggaagaataaactggttattgcaaatcaaccctgaggatgaggcctttcaacaggcgagagagagtgtaaagcgaatgctggttgcatggtaagaaaagcgtcaggcagacgtttctgcctgaccgtttaggggagaattactgcaactgcgcggcaattagcggccagcgggcgtcaaaatcatccgtcgggcggtatttaaactcgctgcggacaaaacgtgacagcataccttcacagaaggccaggatctggcttgccagcagggtttcatcggtggtgtaaccttcaccctcacgcattctcttttcacgcaatacctgacgcagctgcgcttcaatacgctcgaacagctggttgatgcgcccttgcaggcgatcctgttcaaacattagcgcatgcccggtaaggatgcgggtcaggccaggattacgctcaccaaaaccgagaagcagcaacacaatcagacgcaggcgcgctgtggtgtctttctcatctttcagaatcaggttgatgcgagtaatcaggctatcttcgataaactcaatcaggctatcgaacatgcgggtcttactggggaagtggcgatatagtgccgcttcggaaacgccgacagaggcagccagttttgccgtcgtgatacgttggcttccatcgctggattccagcatcagcgccagagactgaagtatttcctcgcgacggttccttttcgcagtttgtttttctgccatgttacaaaatacccctgaaaataagcacttgccaggcggcacccacgctatgaccgcaaacgaaatgtttgcggctatgttatgacgttattcggatgcgtatgtgttactgacgaccagagtgaccaaagccgccttcaccgcggtcggtggcgtcgaaatcttccaccagattaaattcagcctgtactaccggaacaaaaatcatctgggcgatgcgttcgccaggttgaatggtgaagctgtcctgaccacggttccacacggaaatcatcaactggccctgatagtcggaatcgatcaatcctaccaggttaccaagcacgataccgtgcttatgtcccaatccggagcgcggcagcatcattgccgccagtgaaggatcggcaatatgaatcgccagcccggtcggaaccagcgtagtatcacccggagccagttctacggcgtcgtcgagacaggcacgcaggtcaagtccggcagagccagaggtggcataagtcgggagcggaaattccttcccaacgcgcgggtccagaatcttaacgtcgatttttttcatcataacgggtcacgatctcgtcgagtaataattggccaaggagctctttgcgctcaagcggtaagactttatctccgtcctgccagaaaaggtgtaatgcgttgttgtcgctgttaaatccttgagttggctgggaaacatcgttcgcgcagatcagatcaaggtttttacggatacgtttttgccgggcgtattcttccacattatttgtttcggcggcaaatccaacgacgtagggtcgatggtcttttagtgcggcaacgcctgcgacgatatcggggtttttaaccatttttattgtgaattcatcaccctgcgtggcctgctttttgattttttctggggccacggtagctgcgcgataatccgccacggcggcgcaaccgataaaaatattttgctgctgtacagaagcattcacggcggcttccatttccagcgcggtcatcacatcaacacgtttaacaaacggtggtgtcggtagtgaaactggacctgataccagcgtgacgttcgcgccacgacgggcagcggcggcagcgatagcaaaacccatcttgccggagctgtgattagagatataacgcaccggatcgagcggttcacgcgtcggaccggcggtaatcataatgttcagatgtttcaggtcgttgacgggcgaaaaatgcgctaccgccatatccacaatggttaacggatcgagcattcgcccagggccgatatcaccacaagcctgactgccactgtctggcccccagatgagcaaaccacgggaggcaagcacctctaaattatgctgcgtggcagcggcacggtacatctgctggttcatggcggggagcacggctacacgcgcaggtgtagccagacaaatcgtcgataccagatcatttgccattccggcagcaacacgggcaatcaaatctgccgtggcaggggcgagaatcactaaatcagcccatttacccagctcaatatggcccatagcggcttcggctgccgggtccagcagactgtcggaaacgggataaccagaaaccgcctgcaaactaagtggggtgataaaggcttttgccgcttcggtcatggctacgcggacgtcggccccgcgatcgcgcaaacgacgcaccagttcaggggttttataggcagcaataccgccgctaacgccgagaacgatttttttaccggccaggctcatgatgatttttcctgttgggtgacaccagaagttggcgattttatcacaatacttttgttgtcgtgccttcacctgagattcactttgcgaggcgctttccaggattgaaaactggccgtcgatttaacggaacggctatgacaggatgcgagcaccacaaaggaggtgaaggtgaaaaacaatgcacagctgttgatgccgcgcgaaaaaatgctgaagtttggtattagcgccttaacggatgtcgagctgctggcgctatttctgcgtaccggaacgcgcggtaaagatgtattaaccctggcaaaagagatgttggagaatttcggctctctttatggcttgttaacctctgaatatgaacaatttagtggtgttcatggaattggcgtagcgaaatttgcccagttaaaggggattgctgaactggcgcggcgttactacaacgtgcggatgcgtgaagaaagccctttactcagcccggagatgacgcgggaatttttacaaagccagctcacgggtgaggagcgggagatctttatggtgatctttctcgactcacaacaccgggttataacgcatagccgacttttttccggcacgctaaaccatgttgaagtccatcctcgggaaattatccgcgaagcgataaaaataaacgcctcggcgctgatccttgcacataatcacccttcgggttgtgctgaacccagtaaagcggataaactcattactgaacggataataaagagttgtcagttcatggatttacgcgtgctcgaccatatcgtgattgggcgtggagagtatgtttcttttgccgaacgcggctggatttaacccgctatgcgcgatccttcgggatctttgtctgttcgggacttgagcacatcgctgagtcagcgtatactacgccacctttgagaatctcgggtttggcatttgggcctggcaatcgagagttcacatagaactgcgatgaccgggctgtaaagcctgacgaggcgccaataccccatacgaagctcgagctaatttgatttttggagaatagacatgtcccgagtctgccaagttactggcaagcgtccggtgaccggtaacaaccgttcccacgcactgaacgcgactaaacgccgtttcctgnnnnnnnnnntgcactctcaccgtttctgggttgagagcgagaagcgttttgtcaccctgcgcgtatctgctaaaggtatgcgtgtaatcgataaaaaaggcatcgatacagttctggctgaactgcgtgcccgtggcgaaaagtactaagtacttagaggaaataaatcatggctaaaggtattcgtgagaaaatcaagctggtttcttctgctggtactggtcacttctataccactacgaagaacaaacgtactaagccggaaaaactggaactgaaaaaattcgatccagttgttcgtcagcacgtgatctacaaagaagcgaaaatcaaataattctcgctttgatgtaacaaaaaacctcgctccggcggggttttttgttatctgcttgcccccatattgattgcatctgttcattcctggagatgctatgcctgaattacccgaagttgaaaccagccgtcgcggcatagaaccgcatctcgttggtgcaaccattcttcatgcagtggtgcgcaacggacgcttgcgctggccggtttcagaagagatctaccgtttaagcgaccaaccagtgcttagcgtgcagcggcgggctaaatatttgctgctggagctgcctgagggctggattatcattcatttggggatgtctggcagcctgcgcatccttccagaagaacttccccctgaaaagcatgaccatgtggatttggtgatgagcaacggtaaagtgctgcgctacaccgatccgcgccgctttggtgcctggctgtggaccaaagagctggaagggcataatgtgctggcccatcttggaccggagccgctcagcgacgatttcaatggtgagtatctgcatcagaagtgcgcgaagaaaaaaacggcgattaaaccgtggctgatggataacaagctggtggtaggggtagggaatatctatgccagcgaatcactgtttgcggcggggatccatccggatcggctggcgtcatcactgtcgctggcagagtgtgaattgttagctcgggtgattaaagcggtgttgctgcgttcgattgagcagggtggtacaacgctgaaagattttctgcaaagtgatggtaaaccgggctatttcgcgcaggaattgcaggtttacgggcgaaaaggcgagccgtgtcgggtgtgcggtacgccgattgtggcgactaaacatgcgcagcgggcaacgttttattgtcggcagtgccagaagtaattcatgcgcgccggatggcataccatccggcataaacgctacgctaacttcgccatcagcgcctgatggacattctccggcaggaaatgggtgacatcgccctgaaggcgcgccacctctttcaccaacgatgaagagataaacgaccactctttcgacggcatcagaaacacactttccagttccggcattaagtggcgattcatatgcgccagctgcatttcatattcaaaatccgccaccgcacgcaggccacgaatcagcaccgtagcgtgttgattacgggcgaagttcgccatcaaatcactaaacccgaccacttccacgttccccagatgcgcggttgcctgctgtgccagcgccacacgctcttccagggtaaacatcggttttttactggggctggcggcaatcgccagaataacgtgatcgaacatttgcgtggcgcgcgtcacgatatcgatatgaccattggtaatgggatcgaaagtaccaggataaatcgcccgtttttgcataacaacctcaatgcgttttcggtggcaggtaaggttccagcagttgaagcagacgctgtagcgcgccctggttttgatacagtacttcaacggcatgacggccatagaaactacggtaatcggcgtcggtgagtaaagaggacacctcttttgcaagcgtagtggcatcggtaacggtaatcagcccgcttgcctgctccagccgcgcgcaaatgtctttaaagttaaaagtatgcggccccatcaataccggaatagcgtgtgcggcagcttccagcggattatgcccaccacgttcaaccagtgaaccgccaacaaaggcgagatcggcaatgccgtacagtaacatcaactcgcccatcgtatcgccaaccacaacctgcgtgctggtggaggggacttcccctgaagagcgtgtgatatagcttagtccagcctggcggacaagattaatcgcatccgggaagcgttctggatgacggggtaccaggatgagcaataaattcgggaattgctgtaacaatgcctgatgtgcggcgatcaccacactctcttcgccttcgtgagtgctggtggcaatccataccgggcggtgtggtgcccactggcggcgcagcgtcacggctttagcagccaactgcggcgttacagaaatatcgaatttcaggctaccggtaacggtcacctgattattttttgcgcccagcgccacaaaacgtgcaccatcttcttcattttgcgcagcaatcagcgtaatacgacgcagcaagcgacggacgaatttacccagtttggcataacctgcggccgagcgggcagagagtcgcgcgttagcgatcaccagcggaattttacgtttgtgtagcgccgcaatcaggttaggccatagttcggtttccataatcaacaccagtttggggtcgactttattcaggaaacggttgagcgcatcgggcaggtcatacggcagataaacgtgctgaacatccttcccgaaagccgattgtacgcgctccgaaccggttggcgtcatggttgtaacggtaatcggtaaatcaggataacgatggcgcagcgcgcgcaccaacgggatcgccgccagagtttcaccgacggagacggagtgcagcataataccgcctggttttagcggatggcggtaaaaaccgtaacgttcaccccagcgttttcgataggccggagccttacgtccgcgcacccagagccgtatccagatcagcggctgaataaggtagagaagggcggtgtaaagcaattcgagcatagtaaatagctgacttatggatgtgctggggattctatgtatttagctgtggctttaccattacttttcccgtttttgacttaaatagcaatttacccgcca

SEQ ID NO: 208 - DNA, 29100 bp, Escherichia coli
  source 1..29100: mol_type = genomic DNA
cactattaataagtgtgcggctaacgctgcgcgcattgcacgcctgtcggcaaataacccgctcggcttttgggtcagctccgccatggcgggcgcgtatgtgggtcttgggatcatcttgattttcacgctcggtaatttgctcgacccgtccgtacgtccgctggtgatgggcgcgacctttggtatcgccttaacgctggtgattatcgccggttctgaactgttcaccggacacaccatgttcctcacctttggggtaaaagcgggcagcatcagccacgggcaaatgtgggcaatcctgccgcaaacctggctgggtaacctggtcggttccgtcttcgttgccatgctctatagctggggcggcggtagcctgctgccggtagataccagcatcgttcactccgtcgcgctggctaaaaccactgcaccggcaatggtactgttcttcaaaggtgcattgtgtaactggctggtttgcctggcaatctggatggcgctgcgcactgaaggggcggcgaaatttatcgctatctggtggtgtctgctggcatttatcgcgtccggctacgagcactctatcgctaacatgacgctgttcgcgctctcctggttcggcaaccacagcgaagcctacacgctggcgggtattggtcataacctgctgtgggtgacgctgggtaatactttatcaggtgccgtattcatgggattgggttattggtatgctacgccgaaagcgaatcgtccggttgcggacaaatttaatcaaactgaaacggctgccggttaattactaaggggtttttacgtggatcatttgcctatattttgccaattacgcgatcgcgactgtctgattgtcggcggtggtgatgtcgcggaacgcaaagcaaggttgctgttagacgcaggcgctcgcttaacggtgaatgcattagcgtttattccacagttcaccgcatgggcagatgcaggcatgttaaccctcgtcgaagggccatttgatgaaagccttctcgacacctgctggctggctattgcagcgacggatgatgacgcgcttaaccagcgcgtcagcgaagccgctgaagctcgtcgcatcttctgtaacgtggtcgatgcgccgaaagccgccagctttattatgccgtcgattattgaccgctcaccgctcatggtcgcggtctcctctggcggcacctctccggttctggcacgcctgttgcgcgaaaaactcgaatcactgctgccgttgcatctgggccaggtagcgaaatacgccgggcaattacgcgggcgagtgaaacaacagttcgccacgatgggtgagcgtcgccgtttctgggagaaattgttcgttaacgaccgcctggcgcagtcgctggcaaacaacgatcagaaagccattactgaaaccaccgaacagttaatcaacgaaccgcttgaccatcgcggtgaagtggtgctggttggtgcaggtccgggcgatgccgggctgctgacgctgaaaggactgcaacaaattcagcaggcagatgtggtggtctacgaccgtctggtttctgacgatattatgaatctggtacgccgcgatgctgatcgcgttttcgtcggcaaacgcgcgggataccactgcgtaccccaggaagagattaaccagatcctgctgcgggaagcgcaaaaaggcaaacgcgtggtgcggctgaaaggtggcgatccgtttatttttggccgtggtggcgaagagctggaaacactgtgcaacgcgggtattccgttctcggtggttccgggtattaccgcagcttctggttgctctgcctattcgggtattccgctcacgcatcgcgattatgcccagagcgtgcgcttaattaccggacacttaaaaactggtggcgagctggactgggaaaacctggcggcagaaaaacagacgctggtgttctatatggggttgaatcaggccgcgactattcagcaaaagctgattgaacacggaatgccaggcgaaatgccggtggcaattgtcgaaaacggtacggcagtcacgcagcgcgtgattgacggtacgctcacacagctgggagaactggcgcagcaaatgaacagtccatcgctaattattattggtcgggttgttggcctgcgcgataaactgaactggttctccaaccattaatttaacccgggccagagaattctggccttcttaatgactctttttatatattcagcaaataaaacataaccccttaataaatattatctgctaatgggttatattcaccgttacagcgacttacaaaattaagtcattcgctcactgacgccaattaaatattcctgtattgttcttaatgagcagtctgcttatattcatataatcaatgaatattaattaatatataatacatagggaatgtaaatgaacaaatttattaaagttgcactggtaggtgcagtactggctacgttaactgcatgtactggtcatattgaaaaccgtgataagaactgctcttacgactacctgctgcacccggcaatttctatttctaaaatcattggcggttgcggtcctactgcacagtaagtctctgacagaaatcggctaacaccggtttaattgcccgacgccctctggattttccgagggcgtatttgtttctatgtccttcttgcccccgcccgtaaaaatattttcactttaaattcaatttgataactacatccattagccacagcgcgatcctgtgcgaaattttgtgatcttcctccacattacataacatcatatgttgttatattcatcatgcattgtcatgttaccttttaaatgactgcaaactctcccctacaacgtattggacaagaaaaaggtatcgctatgggaagccaggaactccaacgcaagctcggattttgggccgttcttgcaatcgccgtcgggacaaccgtcggctccggtatttttgtatctgtgggtgaagtggcaaaagcagcgggcacgccgtggcttacggtgctcgcgtttgtcattggcgggttaattgtgatcccgcaaatgtgcgtctatgcggaactatccaccgcttatccggaaaatggcgcagattatgtttatctgaaaaatgccggaagccgaccgctggctttcctctccggctgggccagcttctgggccaacgatgcgccgtcattgtcgattatggcgctggcgattgtcagcaatcttggctttttaacgcctatcgatccgttgctcggtaaatttatcgccgccggattaattatcgcctttatgttgctacacctgcgctccgttgaaggcggcgcagcgtttcagacgctaattaccatcgccaaaattatcccgttcactatcgtcattggccttgggatcttctggtttaaagcggagaattttgccgcccctaccaccactgcgattggcgcaacgggcagctttatggcgctgctggcggggatctctgccaccagttggtcgtataccggcatggcctctatctgttatatgaccggcgaaattaaaaaccccggaaaaaccatgccacgagcgctgattggttcctgtctgctggttctggtgctctacaccctgctggcgctggtgatttccggcctgatgcccttcgacaaactcgccaattctgaaacgccgatttccgacgccctgacctggatccccgcactcggcagcaccgctgggatctttgttgccatcacggcgatgatcgtcattcttggttcgctttccagctgcgtgatgtaccagccgcggctggaatacgcgatggcgaaagacaacctgttctttaaatgcttcggccatgtgcatccgaaatacaacacgccggatgtctccatcatcctgcaaggggcgctggggatcttcttcatcttcgtttccgatctcaccagcctgctgggttatttcaccctggtgatgtgtttcaaaaataccctcaccttcggctccatcatctggtgtcgtaaacgcgacgattacaaaccgctgtggcgtactccggctttcgggctgatgaccaccctcgccattgcgtcaagcctcattctggtcgcctcaacctttgtctgggcaccgattcccggccttatctgcgccgtcatcgttattgctactggtctgcctgcttacgccttctgggcgaagcgtagccgccagctcaacgctttgtcgtaatgttatctggagaaaataaaatgttggatattgataaaagcaccgtggactttctggtcaccgaaaatatggttcaggaagtggaaaaagttctcagccatgacgttccgctggtgcacgccatcgtggaagagatggtgaagcgcgacattgatcgtatttatttcgttgcctgcggctcgccactcaacgcggcgcaaacggcgaaacatctggcggatcgctttgccgatcttcaggtctacgccatttccggctgggagttctgcgataacaccccgtatcgcctcgacgatcgttgcgcggtgattggcgtttctgactacggtaaaacggaagaggtaatcaaagcgctggagctgggccgggcctgcggcgcactcactgcggcgttcaccaaacgcgcggacagcccgattacctcggcggcggaatttagcattgattatcaggccgactgtatctgggaaattcacctgctgctctgctacagcgtggtgctggagatgatcacccgcctcgcgccgaacgcggaaatcggcaagatcaaaaacgatctcaagcagttgccgaatgcgctcggtcatctggtacgcacctgggaagaaaaaggccgccagcttggtgaactggccagccagtggccgatgatttataccgttgctgcgggtccgctgcgtccgctgggttacaaagaaggcattgtaacgctgatggaatttacctggacgcacggctgcgtgattgagagcggagagttccgccatggcccgctggagattgtcgaaccgggcgttccgttcctgttcctgctcggcaatgatgaaagtcgccacaccaccgaacgcgccattaactttgttaaacagcgtactgacaacgtgatcgtcatcgattacgccgaaatttcgcaagggctgcacccgtggctggcaccgttcctgatgttcgtgccaatggagtggctctgctactacctgtctatttacaaagatcacaacccggatgaacgccgctattacggtggtctggtggaatattaatccctctcccggcccggcaacgggccgaatttacgcaaggagttacccgatgaaaacaggtatgtttacctgcggccaccagcggctgcctattgaacacgcatttcgtgatgcaagcgagctgggttacgacggcatcgaaatttggggcggtcgcccgcacgcgttcgcgccggacttaaaagcgggcggcatcaaacaaatcaaggcgctggcgcagacgtatcagatgccgattatcggctatacgccagaaaccaacggctatccgtataacatgatgctgggcgatgaacatatgcgtcgcgaaagcctcgacatgatcaagctggcgatggatatggcaaaagagatgaacgcgggttatacgctgatttccgcggcccacgcgggctatctcacgccacctaatgttatctggggacggctggcagagaacctaagcgaactgtgtgagtacgcggaaaacatcggcatggatctgatcctcgaaccgttaacgccgtatgaatcgaacgtcgtgtgtaatgctaatgatgtgcttcatgcgctggcgctggtgccttcgccgcgcctgttcagcatggtcgacatttgcgcgccgtatgtccaggcggaaccggtgatgagttatttcgacaaactgggtgataaattgcgtcatctgcatattgtcgacagcgacggggccagtgacacacattacattcccggcgaaggcaaaatgccgctgcgggagctgatgcgcgatattatcgaccggggctatgacggttactgcacggtggaactggtgacgatgtatatgaacgagcccagactctatgcccgccaggcgctggaacgctttcgcgcgctgctgccggaggatgagagatgaaaaccctggcgacaatcggcgataactgcgtcgatatctacccgcaactgaataaagcgttttctggcggtaatgcggtcaatgtggcggtgtactgcactcgctacggcatacagccgggatgcattacctgggtgggtgacgatgactacggcacaaagctgaagcaggatctcgcccgcatgggcgtcgatatcagccatgtccatacgaaacacggcgttaccgcacaaactcaggtggaactgcacgacaatgatcgcgtttttggcgactacaccgaaggcgtgatggccgactttgccctgagtgaagaggattacgcctggctggcgcagtatgacattgtgcacgcggcaatctggggacatgcggaagacgcattcccacagctgcacgctgcgggcaaacttaccgctttcgacttctccgacaagtgggacagcccgctctggcagacactggtgccgcatctcgattttgcctttgcctccgcaccgcaagaagacgaagcgctgcgtctgaagatgaaagcgattgttgcccgtggcgcaggaacagtgattgtcacgctgggtgaaaacggcagcattgcctgggatggcgcgcagttctggcgtcaggctcctgaaccggtgacggttatcgacaccatgggtgccggagattcgttcattgccggattcctttgcggctggtctgcggggatgacattaccgcaggcgatggcgcagggaacggcgtgcgcggcgaaaaccattcagtaccacggtgcctggtaggtataacgttggcgtgagcatcttcacgccaacgtgctgttacttgccggaaaacgaccctataatccgagtaattcattctttatttcagggtcgattatgtcagctacggaccgctactctcatcaactcctctacgctaccgtccgccagcgactgctggatgatatcgcgcagggggtttaccaggccgggcaacagatccctaccgaaaacgagctttgtacacaatataacgtcagccgcattaccattcgcaaagccatcagcgacttagtggcagacggcgtactgatccgctggcagggaaaaggcacctttgtacaaagccagaaagttgaaaacgccctgcttactgtcagtggttttaccgattttggcgtctcacaaggcaaggcgacgaaagagaaagtgatcgaacaggaacgggtcagcgccgcgccgttttgcgaaaagctgaacatccccggaaacagcgaagtgttccatctctgccgggtgatgtatctcgataaagagccgctgtttattgatagttcatggatcccgctgtcgcgttatcctgactttgatgagatttacgtcgaaggaagctccacctatcagttatttcaggagcgttttgacacgcgagtggtcagcgacaaaaagaccatcgatatctttgccgccacccgcccgcaggcaaaatggctgaaatgcgaactgggcgaaccgttgtttcgcatcagcaaaatcgcctttgatcagaatgacaaaccggtgcacgtctccgaactcttctgccgcgccaatcgcatcaccttaactattgataataaaagacattaaccgtaggccggataagatgcgccagcatcgcatccggcgatgctggcgcgttgaattttacatcccgtacgttcctctcaccctaaccctctccccaaaggggcgaggggaccgttcagtacggaatttagcttgacggtgctatccagcattaaatactggcaatactctcacgcaaaatccgcagcaccgtctcttcaccgctgcgattcgggttaatgcgaatcgcacaatgttctgattgtggattcgcctggcgaaacgttccggaaaggcgataaaagagcggcgggatttcatatttcgactctgcacccaccgggtaaggcaaggcaccgcgcttttgcgcctcttccagcactctggcggcaatcggctgatgaaactcgacaatcaacaccttcgactgcgcattagcaatcaccgcgcttttcacttccggcaccgcaccaccgttaagcaaagccagcaaccgttcagatacccctgcctgcaccgcgtgcatcactggcgcaaacaccagaccacgcaagacttccagcgcctgtgcgccctggatctggctaccgccggagtaaagcgtggcgcgaatacggttgataacatcagcatcgccgaccactgcaccaacaccctctggcccaaatagcttgaagcaggaaaatgtcgagacattcgcgccgcattcacagccgattcgcgccaccttcatcaccgcatagttgtcatcggttaacgctggaacacctgccgcgcgcaacgttgccagcacatctgccagcacgtagctgtcctgcggctgctggcgcgtatgctgcaccagcgccgcatccggttgttgctcgtcgacgacctgcttcagtgccgacaggtcattgaaatcaacagtaataagcgtcagccccatctgctcaataataacccgtgtcgtcgggtaaacaggcgcgtcatgcaccagaagacgctgccccggtttgagcaaagccgccagcccggcgcgaatcgcgccagtccccgcgccctgcaccagcgccgcagcctgtgcgtgaaatgcatcagccagcacctgttccacacgctgggtaacgcgcggttgattcagtcctggcgttaagcctaaatcaccgccagtaagaaactcgctgccggggaaatggcgacaaatgctatccaccagcgcaaactgcttttgctgcgcctcaataatcgtcaggctttgcagaggaaacgtcttcataggtgccttccttaagccggaacgaacaggccaagccagtaaagaacattcagcagaataccggtgatcattactgccacgaccggtgccgccattttctgtaccggacggcccagggattcgttgaggaagtaaatggcaaccgcgatagagaatccggtataacccgccatcttaattgctgcgaaaatcgaaccgaccagcagcgccacttccatcagcatattcatggcgttacggatgttatccgacgcattacgcaccgacgggtagcgtcccagccatttgccgatcgaacgaagcagcaagacttccgccgaaataaccactgcgcctaataccgctgcaaccatcggattcggcgagagatagcccaccgcataaacaaaggtaaagcccgcaactgcatacacacccgttgctaaggcggtggtggcaatcaacggtacaaaacccagcccgcgcataaattctgccagtgccgcctggttgatcagcgtttgcgattgttccggcgttacgcctgcggagtacgctttctccagagtgaagatcgacacttcactgccggcgaaaatcttcatgctggcaacggcggcaatcaatgctcccacgatggcgatatagggtaagtttttgataatccgcgacgtgcgttcttcaaacaccgaaagcccgctggcatcaatatcattttcatcacgatgacgcaggtcgtgagttatcgcgatccccagcagcatcaccatgccaataaagatttcgatggattcagggttaagatgtgggaaatagcgcacgactaccacacgggtcatcagaacaaccacggcggcgaccagactttgcttccagccaaactggtagaaaatcgccaccagcgggaacagtgcaaaagcagaaaccaccggcgagcttaattccccgaggctacctaatacatccaccggcagcgcggtcagcagctggtttactggcaacaggcaagtaaggatcaatacgccccagatagcgccaagaccaaacgccatcaggctgtttatcgccagtacgccgaggatatcggtaggaagaaagagtaaccatgcgttgagcagtccggttttcagggtaaaagagatccccaccgaggccacaaaaccaatgctcagaccaaaagcgatactccccgcctcgcgacggttcatatagccttcaatcagttgcggcaggatcgggcggatgccgtcatgaaaaacagccgccgagcgatgcgccagaagcgatgtcatacccgtcaggcacgccaccacgataatctgaatatacagatccatagtcgtgccttttatttcagatggttaatcagcatcggaatcgcgtgttcgacgtgctcaacggaaaggccaaacgccacttttccttcagcgatcattttggcgatatgctcgtctttcgctttaatgcctggtttggcaatggtgcaacttttgttatagccaatcaccgcgatggcaatcgacaatgccgcgcccgcaccggtattacacgcaccgatgtagtaatccagttgcccggatttcactttcattgccgcttccatgtcgttgtgaatgaaaacttcaaaactgccaggagccgtcgcttcaatggtttttttaatctgctcacgctgtaagcctgcaacgccaatctttttcatgagtctgtccttattggaaaaattgagagggagtttcacgtaacatcacatccacatcggcctgactgaatcctgactggcgcaattgcggaataaaggtggtcaataaatagtcatagccataaccaccattggcttttaaatgggagcggcgcgtaatatccatcgacagcatgacgcggttcagcaacccacggtcacgtagcgcgtggagcatcgcaatgcgcttttcgtccgggtagtaactgttcttaccaatggtgtcgaactgcacgtacgcgccgagatcgatcatcttcaaaatgttgtcgaggttgtctttcagatcgcagtgaccaacggtgacgcgcgaaagatcaactccgtgggcttgcaacagagccagttgttccagccccatggtgctgaacgaagtatgcgtggagatcgggcgtccggtctggttatgcgccagcgcagcggcaataaacaccttctcttccagcggcgtaatcttcccttcgctagagccgatctccgcgataatcccggctttcaggtcggtgccatcgataccctgttcaatttcatcgaccatctcctgcgccagttcctgcacgctgcgggtcgccacatgctccgggaaaaaagcgtcctggtaataaccggtgcaggccaccacgttgatccccgtctcgcgcattacatcgagcataaattgcgcattgcgccccatgtaacggttggtcatctcaatcacattacgcacgccccgggtcatcaggtcgttcatctcctggcaaatgaacgcatactgatcaaggcggcagtccacgttgtttttaaagccggagagatcaatatgcagatgctcatggaccagggtgtaacccgtcggatcaaaactcatagggtgtctcctgcaaaccggagggaggaaagaaaagagcgaccattttgtggcggtggcgcacggaaaaattcacacacggtagcccccacatctgaaagcgtggtgcgcacaccgagctgcgtagctatcatcccttgctgataaaccagcactggcaccacttcgcgggtatggtggctgtgaccaatggtcggatcgttaccgtgatccgccatcacgaccaggcaatcatctggctgcatcgcctcaacaagccgggcaaggttacggtcaacgacctgcaaacgttcggcataacgtgcgannnnnnnnnngaccagcgaggtcggtttcctggatattggtgcaaataaacgccgtcggatgcgtgttaaattcgtcaagggtgatatccataatccgctggctatccaccaggttttgccagctcacgccataaggattgctgacgatatctgccactttacctaccagcacggttggcacgcccgcctcatacagtttttgcggcacctgcactttttcatcaacaccgtagcccatatgcacgacctggaaaccgttgtcataagcgccagaacgcggcgcattgatgccaataaagcgcccttctttgctttctgcggcatcgagaatacgctgactgtcggttaacaagccgccaaatgtaatgacccgaccgacctgtacctgctcacgcacgatacgaccaattttgattgcgtcgtcaaaagagatcacagagagattggcggtaatgttatagacctggcctaaatccgcctcgagattatcgccaatcgcaaccgcctgattgacccacagaaattgcagttcatcgccacggcgctccacctgccaaccggcggatactaatgcctgctcaacacggtcaatcacatcgcaaaaaggcatccgcagcggcggtaacgggcgcgtgcctaaaatttcctgatgccccataaaggtatcgccaccttcatgttgcagctctgccacgccccaggttgcggaatctgacggctgcatatcgcctggcgcataacccaatgcgttgattagccccagcttctccagcgttggtagctgcaaatgcggcaactggctcaggatgtgaccacaggtattcgccccggcatcttgcggacgcaccagcgtgacatctttcattgcccctacgccaaagctatcaatcactaacaccacaaatcgcgccattacgcccccagagagtttccaagactgtcataacgaccaacgattttcggttcgccacggtgaataccggacaccagcaccacatcgctacgggtgacaaaaatctgcgtgcggaaacagagcaccactgcactgctcaccggatactcgcctgccagcggcagggtgtagtcgatactgctgtcatccacagttttgagattggtttcagtaatcttttgattttctggcgtaaacaccagcgcatgttgcgcatgaccacgacggtagtaaccgccgccgtagcagtagctgtcgccacggaaatgatgggagatttcacttaaccagagcatcgcgatacgttcaggctgatcgccctgctggtttgccggaatagtgcccgtcagcgcatgaccgggttcggcatgagtcacaccgtattccgccagcaatggcagcgaagtgcagctggtcgctgaaggcgcgttcagttgctcaagtgcaataccagatttcgccagttgatcccgtgcctgtatcagcgtgtgaagattcggtgtcggcaaaacttttccggcagcctcatcccaaagcaggcaagggaaatgggtaagtccggctaaatgcagccccggcagtttcttaatttcagcaaccacctcgtgcagcgaatgctgtacaaaaccgctctcctgccccggataaagaaaatcatcgtcgctataaactttgagcagcacaaactgcacacgtccggccttcaccgctgccgcagaaacttcccgcgctttgtcgagagtaaacacggtgatgacgtcggtgccctgttcaacggcgtcagcaacctgatgacaagggatttgtaccagatgcccctgatgcgccaccgacaaaccagcgcggcgcatgactcgcgcctctttgtaatccaccgccacaatgccgctgtaacctaatgccagcaatttttccgccagccatgggttacggccaaactgcttggtcatcagatacagttcaatgccgtaaagccgcgccgtctcaatcagtcgcttaccgttttccagtacctgatccacgtcgatcacccagctgtccggggcgatcttgccctgctgccacaaacttagtgcggcggaaatcagcgccgggttctggcgtttcaatgcttctacaaacatcttgttgcctcgtttctgttccttgaattaaatattcatttttttgaatatttaggttgtgcgacgtggatttgtcgggagcttcaaacctcttcgttagcagccatccataatccataaaggttggccagcaaatagccttcttcacacgggttaacttccagtgcgaattccttcaacaatacctgatgcaattgcacaacagcttgccagtggctggattgcgccagctctgccagcaattcgttatccagcggctctatttcttcaccacggcgactgcgcatcagtgcactcgccatatgtgtaatcgccatcgttccttgctcactgcgcactggcagatggcactctgtttccagtacgttgacgacctgcatcatgcctttgcagatgtccttatcaataacgcctgcctcgcaaagcaggttgagtctggtttccatatcagatgcctttcgtttaataactcggttcctgttccccactcaccacgcgttgttgatgggcgagcagggcgtgtttatctacaacggcacgcagcagttgttgcattgggtaatcatcggctcgcgtcaggaccacggcttcggtggcctgtaaaaatcgcggatcgtctgtgagcggcgtcgcctctaatcccagcatggtcagttcgttttccgccaccacgttccagatcaccgcatcgacatcgcctttaacaatgcgttgtaaactctcgtgataagagagatcgactcgttccacatcactaccgccaaaaaaaacatcggtcatgattttctgatccgccgaacggttatccagccccacgcgcttcacgtttgcggactcgcctttacggcaaatcaactggtgctcgccaacgtaggtgtgcggccccaactccagcgcgaggcataaccctttttgcgtgagataactttccgccgccagtcgggaaaccaccgccatgtcatacacgccgttaagtaaacactccacgcgaatatccgcgccgcgcatatgcgcatagtaaaaaggaatgccatcaaactgagctttcagcccgctcgctaaaccttcgtacaagcgggtatagggcaaaggcatcgcacataccacgttgttgatatccacatgactcagcaatgctttgttatccatctcgaccagataactgccattgcgcccacggcgttcaatccgtatcgctccgcttgattccagcgttttcaacgcggcctgcgtcaggccaaccgatgaacggcattcagttgccagctcatctatggttttcaacctattaccgcatttttcacccaacaaataacgggccagcgtcgtgataacgacgccttcttttttgataaacgttcgacgcataatatattttcaataaaatgaatgtttatatcttcattaaaatgaagataagtggcaactgtgagatgtggaaacggcgaggcgcttcacattttttcggattattgcaaatgaggataaaaaaaccgggtttccccggtttcagagtgatgacgaagtgatttattcgacaatgcgagcaaagggtaattcccactggcgcttgcctgctcccctcaccctaaccctctccccaaaggggcgaggggaccgtccgagcgttttgatattaaggcttcgccacaaaaccaatcgcttcgtacaccgctttcagcgtacgggaagcgtgtacactggctttttctgcgccgtctttcatcacctgttgcaggaaggcttcatcgttgcggaaacggtgatagcgttcctgcaattcagtcagcataccggaaacggcatcagccacttcacctttcagatgaccatacatcttgccttcgaactgtttttccagttctgggatgctctggcccgttaccgcagaaaggatatccagcaggttggaaacgcccgctttgttctgcacatcgtagcgaactaccggcggctcgtcggagtcagtgaccgcgcgtttgattttcttcactaccgatttcggatcttccagcaggccgataacgttattgcggttatcgtcagacttggacatcttcttggtcggctccagcagcgacattacgcgcgcgccagatttcggaataaacggctccggcaccttaaagatctcgccatacagcgcgttgaaacgctgggcgatatcgcgactcagttccaggtgctgtttctggtcttcacccaccggtaccagattagtttgatacagcaggatgtccgcagccatcagcaccggatagtcaaacagaccagcgttgatgttctcggcataacgcgcagatttatctttaaactgcgtcatgcggctcagttcgccgaagtaggtatagcagttcagtgcccagcctaactgcgcatgttctggtacgtgggactgaacaaaaatggtgcttttctcaggatcgataccacaagccagatacaaggccagcgtatccaacgtcgctttacgcagcttctgtgcatcctggcgcacggtgatcgcgtgttggtcaacgatacagtaaatgcaatggtagtcatcctgcatgtttacccactgacgcagcgcacccatgtagttaccaatggtcaattcacctgagggctgtgcgccactaaaaacgatgggcttagtcatttttcgattcctgattttcgctatgcggaagccctaatgcgggcagaaggtcatttatagactgataaattacatcaggctggctgagatcgatagcctcgccgtagttatatccgtaggttaagccaactgatgggcaacctgccgcttttgccgcctgaatatcattgcgtgagtcgccgacaaacagcatctgttgtggggcaattcccatccgctcagccaccagtaacagcgggtccggatgcggttttttgttttgcacatcatcgccgccgataaccacgctaaagtatttggcaatatctaaggcttcgagcagcggcgcgacgaacggcgtcggtttgttggtgaccaggcctagcggcaggcctttagcctgcaacgcgcccaacgtatcggcaacgtgcgggaacaaaaacgtcccctcttcggcaacctcgccatagtagcgatcgaacagtttacgcagaatacgtacctgttcttctgccggaatgtcgtcatcaacgggcggtttacccattgttttacgctgagtcgcacgttcctgacgcgcccaggtcaatgcgcgctccatcagaacatctgcgccgttaccaatccaggtaataacgcgttcttcacctgcgacgggcaactccagcgcatacagcgccatatctaccgcagcagcaagaccgggagcactgtcgaccagcgtaccatcaagatcaaaagcgacgccgcgaatatcttcaaacttattcatgacttacctttgccagttcactgcgcatttcatcaatgacttttttgtagtctggctggtcgaagattgccgaaccggcgacgaacatatccgcgcccgccgcagcgatttcgccaatgttgttcaccttcacgccaccgtctacttccagacgaatgtcaaagccagactcgtcgatacgacgacgtacttcgcgcagtttatccagtgtttgaggaatgaacgactgaccgccgaaaccaggattgacggacatcagcaggatcacatccagcttatccatcacgtaatccagatagctcagcggtgtcgccgggttaaataccagtcccgctttacagccattttctttaatcagttgcagcgtgcggtcaacatgctcggaggcttctggatgaaaggtaatgatgctggcaccagcggcagcgaaatcaggcacaatgcgatcgacaggtttcaccatcaggtgtacgtcgataggggcggtaatgccgtagttacgcaaggatttcagcaccattggcccaatcgtcagattgggaacatagtggttatccatgacgtcaaaatgcacgacatcagcgccagctgccagggcttttgcggtatcttcacccaggcgggcaaaatcagccgacagaattgagggggcaatcaaatactgtttcatccgcttctccttgagaattattttttcgcgggtgaaacgactcctggtttgtacaaagccagcagttcgtccacctttttacgtgtgccgccgttgctgcttatactgcgtcgaactttgacgacatgcaattttgcgcgctgataccactcacgcgttaacatcgtatcgtgattggagatcagcactggaatatggcgctcaaccagaccttcggcgatctccgccagatgcgcttgttgttcaagcgtaaaactgtttgtgtgatacgccgtaaagttggcggtcgcagacagcggtgcataaggcggatcgcaatagacgacggatgcatcatctgcgcgcgccatgctatcggcgtaagactcacaatagaaaaaggcattctgcgctttttcagcgaagtgatacaactctgcttccgggaaatagggttttttgtagcggccaaacggcacgttaaactcaccgcgcagattgtaacgacacaggccgttgtaaccgtagcggttcaaatataaaaacagtaccgcccgacggaacggatcctggcttttgttgaactcttcgcggaactgatagtaaacctcggcgcaatttgtttcgggaacaaacagctcgcgtgcggcctgtacgtactcatcagtacgcatcttcacaatgttatagagactgatcaggtcgctattgatatcggcaaggatataacgagaaaagtcggtgttgagaaacaccgacccggcacctacaaaaggctcaaccagacattcgcccttgggcaaatgccgtttaatatcatcaagcaggggatacttgccccctgcccacttcaaaaaagcgcgatttttcttcatgctgactaactaattacaccttctccggctgtggagaaagctccgacagcatccagcgcttcaggcaactcccgcaacgataaaccattgcgggagataaccttgattacttcagatcggcctgtacctgacgcagcggtttcgcccacgggtttttggcctgaacatctgctggcaatgtagataccgcttttttcgcctcttctttcgaagcgtacacgccagaaaccaggacataccacggctgaccattacgcgtcgtttcatagacaacgtagtttttcagattctctttcttcgcccaaccgttcaggttgtcgtagttagaggaactgctcagctgcagagtgtaatggctggacggtgccgatttcaacgaaccaacattacctgcggtcttccctccagcggctggtgttgccgtggtttgcgccggggatgccgtctgtactggagccgtagtcgccgtctcttttggtgctggcgtagaagtcgcagccggtgccttcgtgctcgccacaggggcagctggttcagtacgcttcggcgtctgtgctaccggcttcggctccgttttcacggttgcttgcggttttttcggttcaatcaccgcctgctgacgagctgggcgcgtagtggacggacgttcagcggtttgcgttttcgccgtgtcacgcgatgcattgccattgcgaacaggcgcgacagtcgcgggttcggtcggcaatgtggaattgaccgccacattgttcaactgttgctgattttgtggctgggtcagcgcattgttcaggtcaccctgcacttcaacacgttgttgaccatccgttgccgccggggtttgcccttgagtcggcgtagaagagatcggtggcagagaaacatcctgctgagtattttccgcagacgtggttcccggcgctggctgcacgccattcgcctgatcggtcgcattgcctgcaagatcaatactcttctcgccagacgcggtttgatcgctggaagaggtcgagggggcttttagcgcagaaccgataccgatgatcaacagcagtagaaccagaatgccgacgcccatcatcatatactgacgagaagcgggtttactggctgcttttttgcgcttacgcggacgacgctctacgcgctcttcatccacggtttcatcttcggattcgtcaatttcttcttcgatttccggttcctcattgcgctctttttgcgcacgagtcggacggcgatcgtcagtgtcatcaagttcaatatcatcaaaattgatctgcggttcgccacgttcagtacgctcagaacgttcagaagattgacgagaacgaccagtacgacgatcgctgggatcgggtttcagctcgtcttctggtttgaattcatccatttaacaccccactaaaaggttaatgcttaccacgttgcaattaacctgaagctaatagaccgcttgataagcggcctgacctttcttgttgttacgctgattgacaatcggcaatggcgttaagaacaagctcgtgcgaaacgccgctgcgaacttcactcttaccaattgccaacggaagaattaagcgtatctctcccgcaaggactttcttgtcacgcagcatatgcggtaaatacgcctgcgcggacatttcgcgcggcccattgaccggtaacccagcccgcttgagcagggttataatacgctgcgtttcggcagaactaaactgcccgagacgttccgacgtccgcgccgccatcaccatacccgcagcgaccgcttcaccatgtaaccaattgccataccccatttcagcttcaatggcatgaccaaaggtgtgtcccagattcagtaaagcacgtaacccggtttcgcgctcgtcggcggcgacaacttctgccttcagttcacaacaacggcgaatacagtacgccattgccggaccgtccagacgcaacaacgcatccagattctcttccagccagttaaaaaacgcaccgtcaagaataatgccgtatttgatgatttctgccagccccgacgctaactcacgcgggggaagcgttttcagacagtcgagatccaccaccactgaagcaggctggtagaacgcgccaatcatgtttttaccgaggggatggttgaccgcagttttgccgccaacggaggaatcgacctgcgacagtaacgtcgtcgggacttgaatgaaacgaacaccgcgctgataactcgccgccgcgaagcctgtcagatcgcccactacgccgccgccaagcgccaccagcgtagtatcgcgaccatgcggcttttgtaacaacgccgtaaagacggtatcgagtacagccaggcttttatactgctcgccgtcagggaggataacgctatcgacgttaacacccgcctgttcaagtacgccgcggaccttatcgagatacagaggagccagggtttcgttggtgaccaacatgacctgctcgcccgatttcagcggtaagaatgaagctggttcattaaacaaaccagatgcgatggtaattgggtaactacgttccccgagagtaacgacaatcctctccataacgcgacatccaccttaattactgtacccgcagacgagtgtatataaagccagaattagttgctttccagcatgtgaataatctggtttgcaaccactttagcgctttgatcatcagtacgaatggtcacgtcggcaatctcttcatacagcggattgcgttcattggccaacgcttccagaacttcacgcggcggtgtttcaacgtgcagcaacgggcgttttttatcacgctgcgtgcgtgcaagttgcttttcgatggtcgtttcaagataaacgacaacgccacgagcggaaagacggttacgcgtttcacgggatttcacagagccgccgccagtagccagcacaataccctgtttctcggtcaactcattgatgaccttttcttcgcgatcgcggaagccttcttcgccttctaaatcgaaaacccagcccacatcagctccggttcgtttctcaatctcttgatcggaatcgtaaaattccatattgagttgttgagctaactggcgcccaatagtgctttttccggcacccataggcccaaccagaaagatattgcgtttctctgccattttttcggtactactaagactattcgttaatgataaacccgcttcgctcagagagcgccgcaggacatgaactgaaacctcataagatattgcgagagtcagactgaaaattatctcaatactccagcgggtttggcaactgaataaatcacccatccctctgcatatctggtcgctgcaagcgcgctgccttgctaccaccgctctggcgataaatcaccgggtaagattagcgtaaaaaagacagcaaaatgccgcctgaatgataaatcatcatcatggaacgcaggcagcgaagagcaccaactctcaaatcggtactccttgtatgctaaatacctgcgcgcgtcaaatagatgaaacacgttcagcataaaaacattaccgcttttacggctgtttactcactggaaaccagtcgtggcgtgataaacaccactaactcgcgtcgttcatcttcttttccgtcatgacgaaataattgcccgaaccagggaatgtcgccaagcaacggtacgctatcctgacccgatttatttttacgggtaaaaatgccgcccagcgccaacgtttctccgcttttgacctcgacctgcgtttcgatctcctgcttatcaatcgccagcacttcgccatcggcctgctgtagcacctgccccggaacgttctggctgatgtgtaatttcagccggatgcgacctttttgtaacaccgtgggcgtgacctccatccccaggacggcctctttaaattccaccgacgtcgcgccactttccccgctggaaacctgatatggaatttcgctcccctgtttaatgctggcaggctgaagatgtgaggccagcagacgcggactggcgataatatccagctgctgtttttgttcgagcgcagaaagctcaagatccagcaagcgtccgttgatgcgcccaatgttaaaaccgacatgcgttgtcgccgtcgctacggagaggtcgctaccaagcgtggtgacttgcccaacgccaccagcgtgttgcgcatcggccagcgtccatttcacgcctaactcacgcaaacttttttcattaatggtgacaatatgcgccgacagctcaacctgcccgaccggcagatccatttgcgctacccactgttcaagcgcgcttaacgccgttttgttatctcgtagcaaaaggcgattggtgcgtttatcgacggtcatactccctttggcactcagtagcttctcccccgctttcgccagttctcccgcgtcggcgtattgcagggttatactgcgattttccagcggcagatttgcctgcgcccgcgcctgctccgcctcctggcgggcgatattgttattctgccaggcaatggaatgcactgagagaatgttgtcttcctgccgcgttatcagtccggcgcttttcactacagtttgtagtgcctgcttccagggaacatctgttagatgtaacgacaccgtaccgctgacgtctggcgacacgaccaggttcaacttctcctgttcagccagcgcctgcaacacctgagctaccggaacgtcatccaccatcagcgtcactttttgcggctttgccgcctgtacgccgggtatcagcatcaacagtagtgcggctatccattgcttcatttgtatctccttgccgttgccacaaccattgtggcggttcgcagtttgtcccggtacccagcgttagtacgtctggcgtcagctgtaaaattgtccagccgttttccagcacatcgttttgctgcacccgtcgccatttcttttgcccgtcttttattacaccgatgatgcgctcgcctcgccctaccatcccctgatagcgccactggctaagttcgctaatccggcatagatcttccggcggtttaaaagggtcacgcataccggttaaaaggcacaatgcaatacctgccaacaaccagcgtttaaccctcatgcggcgtctccagttgtagcgtgaacaaaagatcatcaccttccacgcttaacgaaaaacggctcacgctgacgttgcgctctgccagccgtgtaaatgccgacggcactgcttcccacagcgttttcaacgccaactcgcctccctgcgcggatggatgccaggaaaccagttgcgcgccggataactgaaaatccagtggcgaaaagggcagcgttttttcctcgctgaagggagtggtgtctaccaggcgatacagtgcggcccactgctggtgatgacttgcccgtagtcgaattaatgcgtcgcgctcttcatggtgtgtcgatgacagaaaaatgagcgtaactaacatcagcaaccagaatgcccagcaaaactggcggaggcggggtgatgtggcgaaccaccagtcaaagaacatgttcatcgctaaccttccttgttaactgatactcaaattgccagcgtccctgcgcatcctgctgcgtggccccccgctgattgagatgaaaagaagcatcctggcgaagtgacgtttctagtgcgtttaacgcggtaatgcttgttgtaagccccttgatctccagcgttccctgctgccagcttatcgttgtcagccaggcgtgttcaggtaaaagagccgccagtgcttccagcgcagattgccagtcgcgggtaaattgtcgctggcgctgcctttgcaaacgctgctcacgaatttgttggcgctccagcaaacgtggtttcgttatctgtaagctgtgggcgagttgttgttccccctgaagcaaaacggcgtctacgcgagcttcggcgctgcttgtcagacgcagtattagcgttatcccgacggccagcagcagaggcgcaacgaacatcagcaaccagaaacgcagaaaagcggtccggcgttgctgtcgccagggcaaaaaattaattggcaggttcatcagtacgccttcccaagcgccagccccagcgcgatggcaaagcctccacctggcggcggtagcggcggctgacgaacagaaacggcctcccagggatcaaatccgccttcgccacatatcgcgacgctgtcgggatcaacggataacgctgccgccagctccttcgcgctagtcatccctaccgccagtttgcgcccccagcgatagcgtgtcgcccacagccactgttcgttatcacgccaggccagacattgctgatgagaaggtaaaaaaggcaggaattgctgtaatgcactggcatccggggtgatcgcactaacatgaacacgcaacctttctgccagcgtaagcagcgttgccagctctttgctttgcgcggcagtcacgttataagcggggctgagtgagtcttcgctataatcgaagcgcagggagtccggatccatatccagctcgcgggccatcgtccctgacagccaggccgtttgctcccgctcaccaagggacatcgacgggcgcggaaatgaccgctgtaatgtgcgactggcgggaaacgccaacataatgtgatgacgctgcggcagttcgcgactccaaggtaacaacgttttagccagctgctgcgcatcaacaatccgcccatctttgataatgtcgttctccagcggcaaccgccaccagcgttgcaaaaagcattcttttgcgccccgtacgatcgcaaccgctaccgcttcttgctgttgtaaatgcaaaccaatttgccagatcttaaatgccattgtgatgatctccttatcacccgtcactctgacgggtatatcaatgcgtctggcttgcctttatactaccgcgcgtttgtttataaactgcccaaatgaaactaaatgggaaatttccagtgaagttcgtaaagtattttttgatccttgcagtctgttgcattctgctgggagcaggctcgatttatggcctataccgctacatcgagccacaactgccggatgtggcgacattaaaagatgttcgcctgcaaattccgatgcagatttacagcgccgatggcgagctgattgctcaatacggtgagaaacgtcgtattccggttacgttggatcaaatcccaccggagatggtgaaagcctttatcgcgacggaagacagccgcttctacgagcatcacggcgttgacccggtggggatcttccgtgcggcaagtgtggcgctgttctccggccacgcgtcacaaggggcgagtaccattacccagcagctggcgagaaatttcttcctcagtccagaacgcacgctgatgcgtaagattaaggaagtcttcctcgcgattcgcattgaacagttgctgacgaaagacgagatcctcgagctttatctgaacaagatttacctcggttaccgcgcctatggtgtcggtgctgcggcacaagtctatttcggtaaaacggtcgaccaactgacgctgaacgaaatggctgtgatcgccgggctgccgaaagcgccttccacctttaatccgctctactcaatggatcgtgccgtcgcgcggcgtaacgtcgtgctgtcgcggatgctggatgaagggtatatcacccaacaacagttcgatcagacacgcactgaggcgattaacgctaactatcacgcgccggagattgctttttctgcgccgtacctgagcgaaatggtgcgccaggagatgtataaccgttatggcgaaagtgcctatgaagacggttatcgcatttacaccaccatcacccgcaaagtgcagcaggccgcacagcaggcggtacgtaataacgtgctggactacgacatgcgccacggctatcgcggcccggcaaatgtgctgtggaaagtgggcgagtcggcgtgggataacaacaagattaccgatacgctgaaggcgctgccgacctatggtccgctgctgcctgccgcagtcaccagcgccaatcctcaggaagcgacggcaatgctggcggacgggtcgactgtcgcattgagtatggacggcgttcgctgggcgcgtccttaccgttcggatactcagcagggaccgacgccgcgtaaagtgaccgatgttctgcaaacgggtcagcaaatctgggttcgtcaggttggcgatgcatggtggctggcacaagtgccggaagtgaactcggcgctggtgtcgatcaatccgcaaaacggtgccgttatggcgctggtcggtggctttgatttcaatcagagcaagtttaaccgcgccacccaggcactgcgtcaggtgggttccaacatcaaaccgttcctctacaccgcggcgatggataaaggtctgacgctggcaagtatgttgaacgatgtgccaatttctcgctgggatgcaggtgccggttctgactggcagccgaagaactcaccaccgcagtatgctggtccaattcgcttacgtcaggggctgggtcagtcgaaaaacgtggtgatggtacgcgcaatgcgggcgatgggcgtcgactacgctgcagaatatctgcaacgcttcggcttcccggcgcaaaacattgtccacaccgaatcgctggcgctgggttcagcgtccttcaccccaatgcaggtggcgcgcggctacgcggtcatggcgaacggtggcttcctggtggacccgtggtttatcagcaaaattgaaaacgatcagggcggcgtgattttcgaagcgaaaccgaaagtagcctgcccggaatgcgatattccggtgatttacggtgatacgcagaaatcgaacgtgctggaaaataacgatgttgaagatgtcgctatctcccgcgagcagcagaatgtttctgtaccaatgccgcagctggagcaggcaaatcaggcgttagtggcgaagactggcgcgcaggagtacgcaccgcacgtcatcaacactccgctggcattcctgattaagagtgctttgaacaccaatatctttggtgaaccaggctggcagggtaccggctggcgtgcaggtcgtgatttgcagcgtcgcgatatcggcgggaaaaccggtaccactaacagttcgaaagatgcgtggttctcgggttacggtccgggcgttgtgacctcggtctggattggctttgatgatcaccgtcgtaatctcggtcatacaacggcttccggagcgattaaagatcagatctcaggttacgaaggcggtgccaagagtgcccagcctgcatgggacgcttatatgaaagccgttcttgaaggtgtgccggagcagccgctgacgccgcctccgggtattgtgacggtgaatatcgatcgcagcaccgggcagttagctaatggtggcaacagccgcgaagagtatttcatcgaaggtacgcagccgacacaacaggcggtgcacgaggtgggaacgaccattatcgataatggtgaggcacaggaattgttctgattaaaaaggcgcttcggcgccttttcagttggctgacaaagtgcatttgtttatgccggatgcgggtgaacgcgttatccggctaacaaaatcgtgaaaaatcaatatattgcaggaaacccataagcctgataagcgttgtgcatcaggcaaacttcacgcatttacactcgcccctgccctttcaaccattcgcgcacgaggaacagcgcgctgacattacgcgcttcgttgaagtcagggtcttccagcaaatccatcatatgcgccagcggccagcgcacctgtggtagcggctctggctcatcgccttccagtgattccgggtagagatcttgcgctaccacgatattcattttgctggaaaaataagacggtgccatgctgagcttcttcaaaaaagtcagatcgttcgcaccaaatccaacctcttcttttagctcgcggttagcggcttcgtagacgctttcacccggatcaattaaacctttcgaaaaacctaattcgtaggattcagttcccactgcgtattcgcggatcaggatcaggtgatcgtccacaatcggcacaatcatcactgcttcccggttggttggacgcattcgttcataaacacgccgcacgccattgctgaactccagatccacgctctcgacggtaaacagtcgggaacgggctacagtttcaacattcagaatggtgggtttttgtaa

SEQ ID NO: 209 - DNA, 28439 bp, Escherichia coli
  source 1..28439: mol_type = genomic DNA
atatatacgcaaaaaacattgattaagtgaatataccatggaagaaaaatataaccggagtagtgtatggccaatctctacgacttgaaaaagttcgacttaaaccttcttgtcatatttgagtgtatttaccagcatttaagcattagcaaagctgctgaatcactatatatcaccccatcagccgtgagccagtcgttacaacgcttacgtgcgcaatttaatgaccctttattcattcgctcaggaaaaggtatcgcgccgacgacaacagggttgaatctgcatcaccatcttgagaaaaacctcaaaggccttgaacaaacaattaatatagtcaataagtccgaactaaagaaaaactttattatctacggccctcagctcatttcttgctctaataatagtatgctgatccgctgcctacggcaagatgcctctgtcgagattgagtgccatgatatcctcatgtcagcagagaatgctgaagaactgttggttcaccgcaaagccgatctggtgatcacccaaatgccagtgatcagccgttccgtcatttgcatgccattgcatacaattcgcaatactctaatttgtagtaataagcatccgcgaattactgacaatagcacttatgaacaaattatagcagaagagttcacccaattaatatccaaatcagcaggagttgatgatattcaaatggaaatagacgagagatttatgaatcgcaaaatctcatttcgtggttcctctttgctgacaatcattaatagcattgcagttacagatttactgggaatagtcccctatgaactttataattcctaccgtgactttcttaatttaaaagagataaaactagaacatccgttaccttcaataaagctttacatttcctataataaatcttctttaaataatttggtgttctcccgatttattgaccgtctaaatgagagtttttgatatataactacagacagctactataactttcatctatttattcacagcgcgaatgaaaaataaaacactctgctttacagtgtttactttataattaacagtcttatctcactgttcaccctgtaacgttcagagagcgtcttcagatgtctatttataaaattcctcttccgctcaatattctggaagctgcacgagagcgtattacctggacactcaacaccctaccccgcgtttgtgtctcattttctggcggcaaagactctggtttaatgctgcatctgacagccgaacttgcccgacaaatgggcaaaaaaatctgcgttttgtttatcgactgggaggcgcaattctcttgcaccattaactatgttcagtccctgcgcgagttgtacaccgatgtcatcgaagagttttactgggttgcgctcccgcttacgacgcaaaattccctttcacaataccaacccgaatggcagtgctgggaacctgatgtcgaatgggtgcgtcagcccccgcaagatgcgataaccgatcctgactttttctgcttttaccagccaggcatgaccttcgaacaatttgtacgtgagtttgccgaatggttttcacaaaaacgtccggcggcgatgatgatcggcatccgtgcggatgagtcctacaaccgttttgtcgccatcgccagtttaaataaacaacgttttgccgacgataaaccctggactacggccgcaccaggcggtcatagctggtacatttaccccatttacgactggaaagtggctgatatctggacctggtatgcaaatcatcaaagtctctgcaacccactgtataacctaatgtatcaggcaggcgttcctctgcgtcatatgcgaatttgcgaaccttttggcccggagcaacgacaaggattatggctctatcacgttatcgaaccggatcgctgggctgctatgtgcgcacgagtcagcggggtaaaaagtggcggcatttacgccggacatgacaatcatttctatgggcatcggaaaatcctcaagccagaacatttagactggcaagaatatgcattattgctgctcaatagcatgccggaaaaaacagctgagcattaccgcaataaaatcgccatttatttgcactggtatcagaaaaaaggcatcgaggttccacaaacccagcaaggggacattggcgcgaaagatatcccctcctggcggcggatatgcaaagttttactcaataacgattactggtgtcgggcattatcatttagtcctacgaaagcgaagaactatcagcgttataacgaacggataaaaggaaaacgtcaggaatgggggatactatgcaacaacgattaacgcaggatttaacgcaatttctcgccagcttgccggaagatgatcgcatcaacgcgattaatgaaatccgcatggcgatccatcaggttagcccctttcgtgaagagccagtggattgcgttctgtgggttaaaaacagccaacttatgcctaatgattacaacccaaacaacgtggcaccacccgaaaaaaaactgctgaaaaaatccattgaaatagatggttttacccaacccattgtggtcacgcatacggataaaaatgccctggaaatcgtggatggttttcaccgccatgaaattggtaaaggctcatcatcattaaaattacgcttaaaaggttatttgccggtgacctgtctggaaggtacgcgtaatcaacgcatcgccgcgactattcgtcataatcgcgctcgtggacgccatcaaatcaccgccatgtcggaaatcgtccgtgaacttagccagttgggatgggacgataataaaattggcaaagagctgggaatggacagcgacgaagtgctgcgcctgaagcaaattaacggtctgcaagagctgtttgccgaccgtcaatattcccgcgcctggactgtcaaataactacagctggcgcagtcgttcagctgctgccagcaacgtcgattccttcttggcaaaacagagacgaatcagtttatgagggaagggatcggcgcaaaacaccgatagcggaatcgccgctacgccgtgctcctgcgtcagccactggcaaaactcaacatcatccagggtagatacggcgctgtaatccaccagcaaaaagtatgtaccttcacacggtaaaatctccagccggctttcatttaaagcattcaccagaatatcgcgcttctggcgataaaagtccggtaacgcaagataatgctcaggttctgcacgtagcatatcagcaagcgccagctgtgccggggtattcaccgaaaaggtcagatactgatgtaccttgcgaatttcggcgctgatgggcgctggcgcaacacaataacccactttccagccggtcatatgataggtcttgccaaatgaagaaaccgccactgcccgctcacgcagctgcggatgcgccagcacactggcatggccctgttgtgaaaagttgatgtgctcgtagacttcatcgctaatgacaaaaatctcgtgcccggcgatcgcctgccacaaagcggcgaaatcagcctgctgccagacagttgcactggggttatgcggagtgttgaggatcaccagtctggtgcgctcgcttaacaatgcggcaaattcctgccagtcaacgcgaaaatgcggtggttgcagtgccatacgcttcactattcccccagaaagcgcgatggcgggggagtaactgtcatagctgggatcaaaacaaatcacttcatcgccattgcgcaccagtgcggtaatcgccgcgtataacgcttccgtcgcccctgccgttacggtgatatcgctatcggcatctggttgatagccatacaaacgttccgttttctgagcaatcgcctcgcgcaaggcctgcacgccggtcatgggcgcgtattggtttgccccctgggcaacgtggtacgccagccgctcctgtaaatagcgcggaccatcaaaatcaggaaagccttgcgacaggttaatcgcctggtgttgctgcnnnnnnnnnngctcatctgggtgaaaatagtggtgccaagttgtggaagtttgctttgtggaatcagagggttatttgtcatttttattgtacctgacgaagttgcgtgttgaaggcactataacacgatgctagtatttggcaatcaagacgtttagatgtctaaataaaacaataaggacaacacaacatgcctcacaatcctatccgcgtggtcgtcggcccggctaactacttttcacatccaggaagtttcaatcacctgcacgattttttcactgatgaacaactttctcgcgcggtgtggatctacggcaaacgcgccattgctgcggcgcaaaccaaacttccgccagcgtttggacttccaggggcaaagcatattttgtttcgtggtcattgcagcgaaagcgatgtacagcaactggcggctgagtccggtgacgatcgcagcgtggtgattggcgtcggcggcggcgcactgctcgacaccgcgaaagccctcgcccgccgtctcggtctgccatttgttgccgctccgacgatcgccgccacctgcgcagcctggacaccgctctccgtctggtataacgatgccggacaggcgctgcattatgagattttcgacgacgccaattttatggtgctggtggaaccggagattatcctcaatgcaccgcaacaatatctgctggcggggatcggtgacacgctggcgaaatggtatgaagcggtggtgctggctccgcaaccagaaacgttgccgctaaccgtgcgactggggatcaataatgcgcaggccattcgcgacgtattgttaaacagtagcgaacaggcgctgagcgatcagcaaaatcaacagttaacgcaatcattttgcgatgtggtggatgctattattgctggtggtgggatggtcggtggtctgggcgatcgttttacgcgtgtggcggcggctcatgccgtgcataacggtctgactgtcctgccgcaaaccgagaaatttctccacggcaccaaagtcgcttatggcattctggtacaaagcgccttgctgggtcaggatgatgtgctggcgcaattaaccggggcgtatcagcgttttcatctgccgaccacgctggcggagctggaagtggatatcaataatcatgcggagatcgacaaagtgattacccacaccctgcgtccggtggaatccattcattacctgccagtcacgctgacaccagatacgttgcgtgcagcgttcgaaaaagtggaatcgtttaaagcctgacgtgcaaatttagcagcagcgcgcgccgccttttccaccgtagcgcgcgtcctgccgctcacggaaaaactcttcgtaggtcatcggcgtttgatcgggatggttaacccgcatatgttcgacatagttgtcgtaatcaggcataccaatcatcagcttcgccgcctgacctaaatattttccggcttttgccagtgaatcaaacatcttggcctccgctaaccatgttgctgaaagagtgccggatgcggcgtgaacgccttatccggcctacaaatgctatcaacgcgctcggtcagtcnnnnnnnnnncgccccttcggggagagggttagggtgaggaggaaccctcggcactatgccaacattcgccaacatcccccctcactctgactttagtgtgcgccttttgcctgcgccacgatctcctcgacattttccggcattggctcatacggcgtttctttcgccgttggcttcggatctttcaatgccgccagtgccgtcttaatcgagaacagcgccagaaccaccacgaccaccataaagaagatggttaacccggcatccagacggttgttgaacaccagttgcgccagctgtgactcagtatactgcgacggaatattgccgctgtcgatcattgcctggaacttattagcaatggccaggaagccgactttcgcatccgggctaaacgctttctgccagcctgcggtcagggtacaaatcagcagccaggccgttggtaccagcgccacccaggcgtaacgttgacgtttcatcttgaacaacaccacggcacagagcatcagcgccatccctgccagcatctggttggcaataccaaacagcggccacagagtgttaataccgcccagcggatcgaccacgccctgatggaggaagtagccccacgccagtacgcacagcgccgttgccagcaggttagcaggcagtgaatcggtccgcttcaggccaggagacaccacgcccagcagatcctgcaacataaagcgcgcagcacgcgtacccgcatctaccgccgtcagaataaacagagcttcaaacagaatggcgaagtgataccagaacgccacatccatcataccacccagcgcaccgtgcaggatgtaagccatccccaccgccaacgtcggcgcaccgcccgcacgggaaatgatcgactgttcacccacttcgctggcaatctggttgagcgtatctggtgtaatgctaaagccccagctactcaccacctgcgcggcagaagcgaccacatccgccgtccctgccggagccagcaccgccattgggctgttcatggcaaagtaaacgcccggatcgatgatacaggcggaaaccagcgccataatcgccacgaaggattccattaacattccaccgtagccgataaaacaagcctgcccttcgttcgccagcatcttcggcgtggtgccggaagagatcagcgcatggaagccagacaccgcaccacaggcgatggtgataaacaggaacgggaacaggttaccggtccataccgggccagtgccatcgacaaatttggtcagcgcaggcatggtcagcgtcgggcgcataatcaaaatgcctaccgccagaccgacgatagtcccgattttcaggaaggtcgagagatagtcacgcggggccagcagcaaccacaccggcagcaccgccgccacaaaaccgtagcccaccagcatccaggtcagctgcacgccggtaaagtcaaagtacggtgcccaggtcggactttctgccacccagccgccagagataatggcgaaaatcaggaacaccaggccaatcactgacacttcgccaatgcggcccggacgcagatagcgcaggtagattcccataaaaatcgccagcggaatggtgaacgcaacggtatacgttccccacgggctatgagtcagggctttcaccacgatcatcgccagtactgcaaggataatgaccatgatcataaagcaggctaccagcgcaatcaccccggcagttggccccatctcttctttgaccagctcacccagcgatcgaccgtcacggcgcgtagaaacaaacagcaccatgaaatcctgcaccgcaccagcgagaaccaccccggcgagcagccagatcatccctggcaggtaacccatttgcgccgccagtaccggcccaaccaacggacctgctccggcaatggccgcaaaatggtgaccgaacagcactttcttgtccgtcggcacatagtccagcccgtcgttatggcgcaccgctggcgtcatacgcgtcgggtcaaccgccagcacatttttggcgatatacagcccataaaaacggtaagcgatcagatagatacagaccgacgccaccacaatccacagcgcgttgatctgttccccacgatttaaagcaatgtatcccagagcaaatgctcccattacagagagcactgtccagacgaggtatttccctgatttgttcatagttgttatccgtgtgcgtgtccatagagatgttacattttgtttctataacatctttgtacgatttaacaacacggtaaccatgtaaatcggagttgaaaccaatatttaacttaacaatgttaactcgatcactccgttaaccgagttttcctgcaatctcatttaattctgtcgggctcatcccaaaactgccgtacccagccgacaagtgcagcaacgccgcccctgttcatcgaaaacgacgatttcccagctctgattttgccgcccaagatgcagcggctggcagacgccgcgtaccttgccttcagacaccgggcgatgatgggtggcgttaagttccgtacccaccacacactgcccgtcacgggtcatcataaatccggccatcgatcccagcgtttcagccagcgccgccgacgcgccgccatgcagcaggccaaacggctgatgagtacgggtatcaaccggcatttcggcttccagcacatcatctcccagacgggtatacacaattcccagatgcgccaccattgtgttatcgctggtggcgttcagttcgtcgagcgttaaatggcgtttccagatcatgcttatgcccccagcgttgagccgccatcgaccacaatatcctgtagggtgatatggctggcgaggtcagaggcgaggaacaaaatcgtgttggcgatctcttgtggacgggcgattttccccagcggaatgccgagtttaaactgctcgccaaagccgcgaatacgctgttcttcggcgtcatcgctcacccacagcgtgcgttgcatatcggtgtcggtggagccaggcgaaaccacattacagcgcacgccgctacccgccagttccagcccgacgctcaacgccaggcttttcagcgccgctttcgatgcgccataagcactcataccaatacgcggcgtgtgtgcggcgtcggacgccacagtgacaatcgccccgccccgctgacggcgaaactggttcatggtttgctggaacaggttaaacgcaccgccgacgttaaccgcaaaagtctgctgccagtcctctttactgagctgatcggtcgcgcccatgcgcaaaattcccgccgcattgatcagcacgtccagtcgctccgtttcagctaacagtcgctgacatacctgcgccacctgcccggcgtcggcaacatccattacttcggtcgcaaagggatattgctcctgagtgaacgcttgatcaaaacctgtaactttcgctcccgcctcaacaaacgccagcgccgtggcgtagccgatacctttacctgcgccggttacccagacatttttaccgctgaaatccattatttcacctcgcgggagagtagcttccaccaggcgtcgatggtcgggtttttcgccagcatgacaaagtcgatatcaccatgcactttgcgccagcgcgccgccagcgccatcatgcgcaccgaatccagaccgtagtcgatcaggttgtcgtcatcgaacggttcatcggactcgtccagcaacggcaggataacctcacgcagcgccgctttgctggcggggacaggtgctggcagtaattcttcagtcatcaccacccggccagaccgcccggccacatatttcagcgacatcaaatgctcgtcacggctgaaatcggccagcgcatccgccaccataaacggtttaatatcgcgcataaatgcgtcggttgcggtggtcatacagccaatgtgggcatataccccggtaataatcagctggttacgtccactctctttgagcatttgctccagcggagaacgatgaaacgcgctgtagcgccacttcaccagcaccgtgtcgtcggcatctggcgtcaggcgatccaccaccttttgctgttccggcgaacgggtcaggcccggcccccacatatcattcaacagcgcccgatcttcatcgctctgctctttcggctgggcggtgtaataaaccgggatattgtgctgtttgcagtagtcgcgcagcgcagcaatattcgcgatcacctgctccatcatcgggcagttctcgccccagaagctgacaaaatagtcctgcatatcatggattaacaacgcggcacgttgcggttcaaaggcccagtcaactttattctgcggaatatcgtgagactccggcagtgcgtaagcctgtaattttggaatagccatagtgttctctccttcaggctgatgcgcgtgacgccagccactgacgtaattgttttttatcgactttcccgaccgccgtcagcggaagtgaatccacacactccacgcgatccggtaatttaaattcggcaataccctgttcacgcaggaaacgacgcacctgcaccgcgcgcagcggctcttttaccaccagataagcgcagcttttttcgcccatcagctcatcttccatgctcaccagtgcggcatagatcactgccggatggcgcagcagcaggttttcgatctcttcggcagcgatcttctcgccgccacggttgatctgatctttctcgcgcccctgcacggtgatgtaaccctctggatcaatagagatcagatcgccggaacagtaaaaaccgttggcatcaaaggcgctggcattgtgctgcggacttttgtaataaccgcggaaggtgtacggcccgcgcgtcatcaggcgtccgacttccccttgcggcagtggatttccttcggcatcggcaacccacacttcatcgtccggacacattgggtaaccctgggtatggataattttctccgcgctatcatcaagacgggtgtagttcaccagcccttccgccatgccaaacacctgctgcaactgacagccaatctcagcgggaatacgcgccgcaagggtggcagaaagacgtgcgccgccgacctgtaacagtttcagcgaggcaagctgcgcccggctttcgccttcggtcagcgcctgcaaccacaggctgactgcgggtggcaccagcgcggtaacgttaacctgatgtttttcaatcaatgggaaacagagcgtggcgctgggatcggccgccagaacaaccgttcctccggcaagaaagacgcccagcgatcccggcgaactcatggcgtagttatgagccgccgggatcgcgcacaggtagcgtgtctgttgtgtgaactgacaaatctcgacgctacgacgcacgctgtagtagtagtcgttatgagtgcgcgggatcagtttcggtgtgccggtggtgccgccggaaagctggaaataggccacttcatcagcaggtgatggcgtggcagtaaaatcctcagccggatggttaatcgcatcctgcaagttatgctcaccgctgtcgttgtgcagttgcaccacgcgaatggaggaatgttctgtgacgaaagtattgaggaaatcatccccgctaaacagcgcatgttggcgatcggcaatcagcaatgcgggttcaatctggctggcataggcgttcagttcactacgctgatggctgaacagcgccagcaccggcgcaacgcccagtttcagcagcgcgaaaaaggtaatatacaattcagcgacgttacccagttgtaccagcgcggtttcaccaggtttaatgccctgacggcgtaaactacacgcgaggttatccgccgcctgattcagctcccggtaactcaactgtcgctcgccgtcgataaccgcgatgctgtcactcgcagcgtggcgagtcagaatgtcggtcagcggcaaatcctgccagtagcctttttcccgatagcgacgggcaaactcttccggccagcgggtgaatggaatgctcatcctcgctccttaatgcaatccaaaaacgttcaacatggtagaaagtttgacgcctgtttcgcgccactcacccaacggtgacgacgcaggcacaatccccgctccggcaaacagacgcacctgattttcccgcagcttcgcgcagcggatggtcaccacccattcgccgttaccttcgctgtcacaccaacccacaatgccgccaaacagttcgcggtcgaatggctccagttcagcaataacctgggtcgcggcctgatgcgggaaaccgctcagcgcgggggttggatgcagcagacaggccagagtcagtgcgttttcttgcgaattcgctttaccttcaaagggagttgcgagatgccacagcgtcggcgtggtaatcaattgtggagaggagggaacgtgtaactcactactgcgttcgcgcagtacctctttcatcgcctgagtcaccagttcatgttcatggcgatctttttctgacgccagcagacgattacccgcttcgcgatcgagcacttcatccggctgacgacgcgcggaaccggctaacggaatggagctaaaacgctcgccgtctttacgtagcagcagttccgggctggcccccagcaggacgccaccatcagccagcgggacatggaagttgtaactaaccgggttttgcgcaatcaaccgttccagcaatacgccactatcaatggcggcgacagtggtgatatcaatcaatcgtgacaacaccactttgtcgacctgcggcgtggcggtaagtgcggcggcgcgagcaaccatctgttcaaacgtggtttgttcaggaattgcctggcgttccaccacgttcagcgactggctgcgggtaaaacggcgggctgaggtctgtttttcctggcgggagaacgactgccaggattcgggaatatacagcgacgaaggctgacgtggatcgaagggaatcgccccgaccatcaccggatttttgatgccctgcgctttggcatcggcaaacagcgcggcgagtttttgctggaagggactgtcgggcgaatccccgttcacagccggttcatcgaagcgggcgaaacatcctgacgtcgtaaaactgcggtacggcgacataaagaaaaagcgattgggcgcaagtgttgccatggtctgctgtacttcctcagccagtgacgtatccatatcatcctccacaaaatgataaaggctttaataatgattatcatttatattttcggtcgctaacctaaaagcaaacgcgcactatgtcaactcttgaggtaacgcaatctgcaactcggggttgcatctggttgtggttacaatgaaaatgagaagcattattgatggattcgcataagcgcaatgtgatgtcctgcgccgttctgccccctctcccttccagggtgagggctggggtgagggttaatgttcgcaccagtgctggctgttcccctcaccctaaccctctccccaaaggggcgaggggacggattgtgcgctttgtcgaatttgtcattacgcccttaaccttattaataacaggaagctgatttgtgagactcgccccgctctaccgcaacgcccttctattaacaggacttttgctttcaggaatagccgcagttcaggccgctgactnnnnnnnnnntcagattactgacagccgtggcacacatacactggaaagccagccgcagcgtattgtttccaccagcgtcaccctgaccggctcactgctggcgattgatgctccggtgatcgccagcggcgcgaccacgccgaataaccgcgtcgcggatgaccagggctttttacgccagtggagcaaggtggcgaaagaacgcaaactgcaacggctctatatcggcgaaccgagcgccgaagccgttgccgcgcaaatgccggatctgattttaattagcgcaaccggcggggattcggcgctggcactgtatgatcagctttccaccatcgccccgacattaatcatcaattacgacgacaaaagctggcagtcgctgttaacgcagcttggcgaaattaccgggcatgagaaacaagcggcagagcggattgcacagtttgataagcaactggcagcggcgaaagagcaaatcaaattaccgccgcagccggtcactgccattgtctataccgccgctgcacacagtgccaatctctggacgccggaatcagcacaagggcagatgctggaacaactcggctttacgctggcgaagttgcccgcagggttaaacgccagccaaagccagggcaaacgccatgacatcattcagcttggtggggaaaatctggctgctgggttaaatggcgagtcactattcctgttcgccggtgatcagaaagatgccgatgcgatttatgccaatccactgctcgcgcaccttcccgcagtacaaaacaagcaggtttatgcgctgggaaccgagacgttccgtctggattactacagcgccacgcaagtgctggaacgacttaaggcgctgttttaagcattaactgtcagacgctgtcacctgcggcggcgtctggcgaaaacgtcgcaactccaccagcaccagcaataacaacacgccgataatcaacaaaccaaaaccgcttgcgcttgcggaagcaaccggtgtcatgatcgcgcccaaaccacccagcagcgccgcgcctatggcatcgcccgtcacgttctgcgccgtccacaaaccgttaatccgccctaacatcgcttccggggtttgcgtttgcagcattgtatattgcagcaacgaactaaccgcgctcagccagccgaacagcgccagacaaaccacgcctaaaatccacatcggcatcaggccaaacagaccaatggcgaggaacgatcccagcgtggagagcagcatcaataaccctggtcgcgcactatgtgccagcttcccgctggttaacgcaccaatagccgcgccgagcgggatcgccgcgtagagaaaaccaatctgtgccgctgacatctgccagttgtcagccagcgccggatacagtacccgcaccgcgctcgccatcgtcaataaaccacccagcagcgcaatcccgcccacnnnnnnnnnnacgaaatcctgccagtaatgatttcaacggatgctcacgcggctgcggtggcggtggcaacgccggaaggcttaacaacggtagcaaggtaataaacgtgcccgccgccgccagcccgtagttccaggctacgccaccggtcgccagcaataaaccgccaatcatgggcgaaatcaccgaccccagacgcacggtcaacatggtgatcgccccggcctgcattaagttttcacgccctaccagtgctggtgtcgccgccaatagcgccgtaacgccaagcgatgcgaaaaaaccatcccataaaccaagtaaatagattgccagcaatgacggctccggcagcagtgcattaaggcacagtccaatgaagccaatgccacaggtgccgcgcgccagcaaaatcacttttttgcgctcatagcgatccgccagcacaccgccaaccatcaggccaacaaacatcgcgccgccggtcagcgtcaccgaaagccccacctgccaggtagaatgcgtcatcatctggatctgcaccggcaccgcgacgccgagcaaacccagagacacaattgagataaaacgagcgaggaatactgcgcgaaacgccgggtgcgttttcaacaggctgaggttaagcagccaggattgtttattcattacaatgccttgccatcaaatattttaaatacctattcttaggctgcacatgctaacatatccaaataagatcgataacgataattaatttcattatcatggaagttcgtatgtctggttctgttgccgtgacacgcgccattgccgtgcccggattgctgttattactgattatcgcgacggcattaagcctgctcattggggcaaaatcactccccgcttccgtagtgctggaggccctctccggcacctgccagagcgccgactgcaccatcgtgctcgacgcgcgactgccgcgcacccttgccggtttacttgcaggcggcgcgcttggccttgccggggcgttgatgcaaaccctcacccgaaatccacttgccgaccccggcttgcttggcgtgaatgccggagccagctttgccattgtgctgggtgcggcgctgtttggttactcatccgcgcaggaacaactggcgatggccttcgccggggcgctggtggcctcattgattgttgcctttaccggcagtcagggcggcgggcagttaagtccggtgcgtttaaccctggcgggcgtggcgctggcggcggtgctggaagggctgaccagcggcatcgccctgcttaatcctgatgtctacgatcaactgcgtttctggcaagccggttcgctggatattcgcaatctacataccttaaaagtggtgctgatcccggtgctgatcgccggagcaaccgcgctattactgagccgcgcgctgaacagtttaagcctcggcagcgacaccgcgacggcgctgggcagtcgcgtggcgcgcacacagttaattggtctgctggcgattaccgtgctttgtggtagtgcgacggcggtagttggcccgattgcctttatcggcctgatgatgccgcacatggcgcgctggctggtaggtgccgatcatcgctggtcgctgcccgtcacgctacttgctacccctgccctgctgctgtttgccgatatcatcgggcgggtgattgtgcccggcgaactgcgcgtttctgtggtcagtgcgtttattggtgcaccggtgctgatcttcctcgtgcgacgtaaaacgcgaggtggcgcatgatttacgtctctcgccgattaatcatcacctgtttgctgttggtttccgcctgtgtggttgcaggtatctggggattacgcagcggtgccgtcacgctggaaacctcgcaggtattcgccgcgctgatgggcgatgcgccgcgcagtatgacgatggtggtcaccgaatggcgtttaccacgcgtgctgatggcgctgttgattggcgcggcactgggcgtcagcggcgcgatttttcagtcgctgatgcgtaacccgctcggcagccctgacgtaatgggctttaacaccggggcgtggagcggcgtgctggtagcgatggtgctgtttggtcaggacctgacggctatcgcgctggcagcaatggtgggcggcattatcacttcgctgttggtctggctgctcgcctggcgtaacggcatcgacacctttcggttgattattatcggtatcggcgttcgtgccatgctggtggcctttaatacctggctgttgctgaaagcgtctttagaaacggcgctaacagcgggtttgtggaatgcaggatcgctcaacggcctgacgtgggcaaaaacctcgccttccgcacccatcattatattgatgctcattgccgccgccttactggtacgccggatgcgcttgctggaaatgggcgatgataccgcgtgtgcgctgggcgtcagcgtcgaacgttcgcgtctgttaatgatgctggttgcagtggtgcttaccgctgcggcaacagcgcttgccgggccgatttcctttattgctttagtcgcaccgcacattgcccgacgcattagcggcaccgctcgctgggggctaacccaggcggcgctatgcggggcgctgttactgctggcggccgatctctgcgcccaacaactgtttatgccgtatcaacttccggttggcgtcgttaccgtcagcctcggcggtatttaccttatcgtcttgttaattcaggagtctcgcaaaaaatgaccgaatcagtagcccgtttgcgcggcgaacagttaaccctgggatatggcaaatataccgttgcggaaaatctgactgtagaaatacctgatggtcacttcacggcaattatcgggccaaatggctgcggtaaatccacgttactgcgtaccttaagccgcctgatgacgcctgctcatgggcatgtctggctggatggcgagcacattcaacattacgccagtaaagaggttgcacgccggattggtctgttggcgcaaaatgctaccacgccgggcgatatcaccgtgcaggagctggtggcgcgtggacgttatccgcatcaaccgctgtttacccgctggcgcaaagaggatgaagaagcggtaacgaaagcaatgcaggccacgggaataactcatctggcagatcaaagcgtggataccctttctggcggacaacgccagcgagcgtggatcgcgatggtgctggcccaggaaacggcaattatgctgctcgacgaacccacgacctggctggatatcagtcatcagattgatttgctggagttgttaagcgaactgaaccgcgaaaaaggctataccctggcggcggtgctgcacgatcttaatcaggcctgtcgttacgccagccatttgattgcattgcgggaagggaaaattgttgctcagggagcgccgaaggagattgtcactgctgaactgattgagcgcatttatggtctgcgctgcatgatcattgacgatccagttgccggaacgccgcttgtggtgccgctcggacgaacggcaccttcaaccgcaaatagttaaactaagtggtctgccatcatggcatcctgttttctggatgccatcgcatagcgcaacagcacgccaccacaagccaccatcccgccgatcaacgcggaaaggatcacaataatcgccttacccggaccgtcttttttcactggcaatgacgggcttaactgatatttaaacggcgtaaaattcacatcgttgacatgtgcttttgttaattgctcgacaagatactgccgattacgtaattcaccgttcagttccgcaacgtcagtgaccgctttttctatttccagtttgcgttcaataccgtctgcaccgagagaaatagaaaaatcggggtcatctttaacggcctgaccattactgtaaacgggctttttaattcctgccgcgttggcaatgtcgagtgaataattgaggcgctgaatgtttgcatcaagttgatttttcgttttaatgcgatcctgagccagtnnnnnnnnnnactgggttttgatctccagtttattacggacgttttctagcgactctttcaccaccaacgtagagatataatcgatatacccgctcaaaacggtctgcgcctcttcactggttggcgcggtaaaacttagcgtccaggaggtatacagtgacggttcatcttttttcttactggcattgtcatcaaccgctttcattttttcgctcaatgcgacaattgcgcgatgcaaatccagttcgtcgattttcgcctcttttaattggtccatcacataaggtgatgaacgcaggtactcttccagcaagctaaccgactgaaacttcttgataaacaggttaaatgcttctgtacgatcaattttgatatccagatccagcactcgaagcttagtgaatgttttctccagctcttgccactgaacaggttctggaggcgtgacaaccgccgcgctggtccatttttgcggcaggatgaaagagatcagcaagcctgcgcaggcaaacgcaaaaatgaccgccatgaccgtttttttggcccgccataaaactgcgattagattaagtaaatcaatttcattattactgggcgacgccagaggatactcaggaaaatgagcgtcacttccctgtttaatattcagtgatgacatggggtataacctgaaaatgagtccaataggggaaatctccacggcgctcactttaccagttggtgataattatccgaagctgaagtttgtaaattccttccactgaatgcaacattcactctatttaagagaaatattcatcaaacctataaatcaaacaaataaaaaaacccataattattttctgtaattatgggtttatagatattattaatttacctgtttagcgttgcgcgaataatcggcccaatttttacaaacgcccctggagagataatatccacatgcgcacaatcctgacgatagatatccagctccgcaatccacggcgaccaggcacgttcgggactcataccttcctgaagtgtgcgctcagcaacaaataacgttgcttttccatcaaacggaacgctatgggcggtggttaacaagcgcacagcatcagcgtagttgccttcaatggtggtaaacaactccgttgaagtacttccctgctgtgccgccaggaaggcctcgcgttcgcggttaatctccgccagcacttccgggtccagaccattagcctctttttcctgccagttttgcgtctctggcggccaggtatccagcaaaccaagaaatgccacctgttcgccacgggcacgcagtcgcgccgcaataccctgcgccagcgtaccgccaagggaataccccagcaggtaataagggccgtgcggttgttgctcaagtaacgttgccagatgcgcttcgcagacttcatccaggtttgtcgctgtctgcatgggtccatgagggcgcggcgactgaatgccaataatcgaccattgtggatcgagataacgcgagagcacgctaaactgccaggcaaaaccggacgccggatggaaacaaaacagcgtcgggccattaccttcacgcaacggcagaatggtttcgaatcccatgcgccgggagctgtcctcttcaccatcaataatcgttgccagtttggcgacggttgacgcgaccatcacctgccccggcgtcacctgactagcaaactgtcgacttaactgcgctgctagtttcattgccagtagcgaatgaccgcccagcgcaaagaaatcagcatcggcatcctgcacgtcacaacccagcaacgacgcgaatgccgcggcgataatcgtttcactgcccgctttcggtgcacgtcccgacgcttgtgtcttcagttcaggcaacggtaaggctttgcgatccagcttgccgttggcgctaagcggcaactgcggaagttgcagcagaacgaccggcaccatatgcggcggcaatgtttcgcgaagctgtgcctgtaatgcgctggtatccaacggcagtcccgattgcgacaccagatagcccaccaactgacgcgcatcaccaccggtggctgccgcctggttaatcacacaggcgtgggtaactgcctgttcgacatccggcagcgcctgcatcacgcgatcgatttcgcccagttcgatacgctgcccgcgaatttttagctgatcgtcactgcgcccgaggtactccaccgcgccgttatccagccagcgggcgacgtctccggtacgatacatccgttcacctggggcaaaaggatcggcaataaaacggctggcggtcagatcgggtcgtccaagatacccctgcgccagttggatgccggtgagatagagatcacccgccacacccggcggcaccggatgcatcatcgcatcaagaatacgcagacccgtattccataccggataaccaatcggcacactgctgccgcgcacctgtgccagttcctcgccaaaagccggataccagctgacatctaccgccgcttccgtcgggccatacaggttatgcaacggcgcgccggttaactgttgccattcgcggcataaatcagccggtaaggcctcaccactacagaaaacctgtttcaacgtcgcgcaattctggcgagcggtttgcggcgtcagcgatgcaacaaatgccgccagcatcgacggcacaaagtgcgtggtcgttacgccatattcggcaaagaattgctgcatagcgagcgggtcacggtgcgcttccggttcagccatcaccagttttgcccctgcgataaacggccagaaaaactcccacaccgagacatcaaaactgcacggcgttttttgggcaacgacatcttcgcctgtaagcgggtagtgattttgcatccataacaggcggttaacgatagccgtctgcccgaccattacccctttcggcctgccggtggagccagaggtaaagatgatataagccgtgtggtgcggttgtgaaagttgcagcggcgcactgccctggggggtaagcggggcgttatagcaaaggcttgttaaattgggaacatcgctaaagcgcggcagttgatcgtcggtggtaattaacagcgacggacgcgcatcttccagcatcattttcaggcgatcgtccggatagccggtatccagcggtagccaggccgcgccagcttcaactattgcatggagtgccagggtcaaaaagaccgagcgcggtagtgccaccgccacgctgtcccctggtttaacgccgcgctcacgcagcagattcgccagcgccaccacctgctcgcgcatttcccgatagctgaacaggtaacgcgcatctgccagcgccggagcatccggtgtttttgccgcttgttctgccannnnnnnnnnagcgcgctcagcgtggtttctggaatctcaacctgagtggcgttgatctgcgccagctgcgcatactcacctggcagcataatatcgacatcgccgcacaacagcgccggatccgcggcgaactgggcaatcagcattttcaggcgttcagcatgctggattaacgttggctcatcgtaacgctgtttattggcgaggatctcaatactcaaatcaccgtgtacatccgggaacagggccagttcaaggtcattaaccggaccggttgccagggtatgggtttgcgcctgaacatcaggaatatccagttggtaatcaaataccttgatattgagtaccggaccaaacagcggttcatcacctgccgctcgcccgctgtcacggacaatttgttcggcatcgtaacgttgatgacgacgcatttttttcagttgtgctgccagtcgggttgccagttccggcagcgtttcttgcgccgcaatgtgaatacccaacggcaaaacgttgagcacgggtccggtagccgtcagcgccgccgagcccagtcgacgcataaagataaatccggcggcgtagtccatacgattgcacaatcgccccagccacaaggctgccagcgcaagggctaaatcggtacgctgcacacctgaaagttgcgtagccagctggcggaattccccgtcggtaaattccagtttcaggcgcagaatatctgccgaggcgctgcgccccggtaaaggtgccggagaaagtgacgcgggcggcggcagttgacgacgctgttctgcccagaatgccgcatcacgctgccaggcttcgctttcgcggtattgctggtactcttccactacatcagcgaaaggcgtaaatggcgaagcaggcgttggttcgccacgcagccatgtgcagtaaatattggcgatctggcgggtaatggccgggaaactgaagccatcgaccagcaaatggtgataacgctgataccagtaccagcggttatccgccacctgtatcagctgatgaaagaccagtggtttaccgctatcgacgcgcagatcttgttgcaaatccgcctgcattaatgcctgcgcagtaccgtgcggatcaatgttggttcgtaggtcgataatttctggcagttcgaacgtcagcgcatcatcgacccactgccagacttcgccgttatcttccgtaaaacgcatccgcagcgtatctgcttgcgctagtccggcaaccaccgcgcgggccagtaatggcgaatcaacctctccggttaactcaacgtaatgcgccacgctccaggcggagggtaattctgacagtttttctgccatccagatgccgggctgtgcggcgaccaaaggtaaatgctggctcattgtgcctcctgcaactgggtaaaattcgtcggtgtcagagtacgccagtgggcttccagccactgctggcaggacgcctgtgactgcggctgacacacaatgtcccagcctgccggtaaggcgcattgttgcggccacagactgaattgcccctgcgcattgcgcaaaatgtaaaacgctccctgcggatcatcgaagggattactgaatgccatattcaactcctgtcatggaaaagtggttgccagaggtcgattagcccctgcatcaagccaccgcgccaacaaagcgcatcatgtccgccgtcaacctgacgccagaaaatggattcttttatggggtgtaattgcgcatacagcgcctgattggcccgcataatcatcggctcgcgaatacccgcttccagcacaatgcgcagaccttcggcgctaacttcaccagctttaagcttttcaagtaacacgccctcttgctgcccgccccgatgcggccaccagtacgatcctgactggcttaatacacagccaaagcgttcaggccagtgcagtccggcatacagcgcggacagcccaccaaaactctgcccggcaaccacggtgcgatcgccgcgatcgctaaaaggggcaatagctttcaccaggggtaataactcttgctgtactgccagccagaaatccgcattacacggcagttcgtgggcgcggtgcgtggtgtcgatagcgtcgatcaacacatacacggcgggaggaagttgctgacgatgggtcagcgaagtcagcacaggccagacgggcatactttgcgcccaaaattcgccatcgagcaaaactgccagcggacgttcttctgctgttacatcgccggtggtaaaaatccatacccgacgtgaatttttcaaccgttcacttttccagataatttctttggctgctatttctggcgcttgcggacaatcccatcccggttgcagaggcgcttgcggcatttcgagtgcagaaacagcgtgccctcgcccgcctttccagctttgtggattcagcggatcggctattgcctggggtaatagttttcgccagccttcacgtaattcgaggcgatcgggggatggtgcagaaaaaatgtcatcgcgttcggtgggaataaagcagtagctgccgcgccagttggcattgagttgtgtcgtccactgccagacatcagtacctgcaattcgctgcatcgactggggctggctgttctgatgatgatcggtcacaccagtgatgtagatccatacgcgctttatcggcgagtattcttcagaaccttggggatcacgccaccagaaagtgacctcaaacatttcgtcattcagacgctgccattccgggccatgtttcgactgccaccagctctcacttcctacttttaacgccgtcacaccataaccccatgtttactgtgcaatttttcattgattgcagaaatatattgataatattattgataactatttgcatttgcaatagcgtaatggcgcgccgtgggaagcgcggacatttattaaccaactgcactgcgtgtctttcaggatcaaaggttttcgcggtagcgggatgcgtcgtgttgaggacgaccatgcccgacagttgcaattcgtggcaaaaatgcaggaataaaacaatgaacaagaagattcactccctggccttgttggtcaatctggggatttatggggtagcgcaggcacaagagccgaccgatactcctgtttcacatgacgataccattgtcgttaccgccgccgagcagaacttgcaggcacctggcgtttcgaccatcaccgcagatgaaatccgcaaaaaccccgttgcccgcgatgtgtcggagatcatccgtaccatgccaggcgttaacctgaccggtaactccaccagtggtcagcgtgggaataaccgacagattgatattcgcggtatgggtccggaaaacacgctgattttgattgacggcaagccggtaagcagccgtaactcggtgcgtcagggctggcgtggcgagcgcgatacccgtggtgatacctcctgggtgccacctgaaatgattgaacgtattgaagttctgcgtggtccggcagctgcgcgttatggcaacggcgcggcgggcggcgtggttaacatcattaccaaaaaaggcagcggtgagtggcacggctcctgggacgcttatttcaatgcgccagaacataaagaggaaggtgccactaaacgcaccaacttcagcctgaccggtccgctgggcgacgaattcagcttccgcttgtatggcaacctcgacaaaacccaggctgacgcgtgggatatcaaccagggccatcagtccgcgcgtgccggaacgtatgccacgacgttaccagccgggcgcgaaggggtgatcaacaaagatattaatggcgtggtgcgctgggacttcgcgcctctgcaatcactcgaactggaagcgggttacagccgccagggtaacctgtatgcgggcgatacccagaacaccaactctgacgcttatactcgctcgaaatatggcgatgaaaccaaccgcctgtatcgccagaactactcgctgacctggaacggtggctgggataacggtgtgaccaccagcaactgggtgcagtacgaacacacccgtaactcgcgtattccggaaggtctggcgggcggtaccgaagggaaatttaacgaaaaagcgacacaggatttcgtcgatatcgatcttgatgacgtgatgctgcacagtgaagttaacctgccgcttgatttcctcgttaaccagacgctgacgctgggtacggagtggaatcagcaacggatgaaagacttgagttccaatacccaggcgctgaccgggacgaacaccggtggcgctattgatggcgtgagtgccaccgaccgtagcccgtattcaaaagcagaaattttctcgctgtttgccgaaaacaacatggagctgactgacagcaccatcgtaacgccggggctgcgtttcgatcatcacagtattgtcggcaataactggagcccggcgctgaacatatcgcaaggtttaggcgatgacttcacgctgaaaatgggcatcgcccgtgcttataaagcgccgagcctgtaccagactaacccgaactacattctctacagtaaaggtcagggttgctatgccagcgcgggcggctgctatctgcaaggtaacgatgacctgaaagcagaaaccagcatcaacaaagagattggtcttgagttcaaacgcgacggctggctggcgggcgtcacctggttccgtaacgattatcgcaataagattgaagcgggctatgtggctgtagggcaaaacgcagtcggcaccgatctctatcagtgggataacgtgccgaaagcggtggttgaaggtctggaaggatcgttaaacgtaccggttagcgaaacggtgatgtggaccaataacatcacttatatgctgaagagtgaaaacaaaaccacgggcgaccgtttgtcgatcatcccggagtatacgttgaactcaacgctgagctggcaggcacgggaagatttgtcgatgcaaacgaccttcacctggtacggcaagcagcagccgaagaagtacaactataaaggtcagccagcggttggaccggaaaccaaagaaattagtccttacagcattgttggcctgagcgcgacctgggatgtgacgaagaatgtcagtctgaccggcggcgtggacaatctgttcgacaaacgtttgtggcgtgcgggtaatgcccagaccacgggcgatttggcaggggccaactatatcgccggtgccggggcgtatacctataacgagccgggacgtacgtggtatatgagcgtaaacacccacttctgatgctaacgtcagattgttgacaaagtgcgcgtcgttcatgccggatgcggcgtgaacgccttatccggcctacaaaaatcttgccaattcaatatattgcaggaccatgttggcctgataagcgtagcgcatcaggcagttttgcgtttgtcatcagtctcgaatatggtcgatatgaaaactacgcatacctccctcccctttgccggacatacgctgcattttgttgagttcgatccggcgaatttttgtgagcaggatttactctggctgccgcactacgcacaactgcaacacgctggacgtaaacgtaaaacagagcatttagccggacggatcgctgctgtttatgctttgcgggaatatggctataaatgtgtgcccgcaatcggcgagctacgccaacctgtctggcctgcggaggtatacggcagtattagccactgtgggactacggcattagccgtggtatctcgtcaaccgattggcattgatatagaagaaattttttctgtacaaaccgcaagagaattgacagacaacattattacaccagcggaacacgagcgactcgcagactgcggtttagccttttctctggcgctgacactggcattttccgccaaagagagcgcatttaaggcaagtgagatccaaactgatgcaggttttctggactatcagataattagctggaataaacagcaggtcatcattcatcgtgagaatgagatgtttgctgtgcactggcagataaaagaaaagatagtcataacgctgtgccaacacgattaattgacaacatctggtacgattcgcccgcagccatcactgaccacgggcgaaagtgtaaagcaggtgccttaccatcctgacctgacaaccggatatgcggggattgctcccataagcgctaacttaagggttgtggtattacgcctgatatgatttaacgtgccgatgaattactctcacgataactggtcagcaattctggcccatat

SEQ ID NO: 210 - DNA, 27863 bp, Escherichia coli
  source 1..27863: mol_type = genomic DNA
atttatagcaactcaatattagcctctcgtataaatacacattaggtgatagattaaccttcgctattttctcactctgtgtcgaatatatttatttcctgaataattaatcatggcaaaaagaaccaaagccgaagctctgaagacccggcaagaactgattgaaactgccatcgcccagtttgcgcagcatggcgtaagcaagacgacactcaacgacattgccgacgctgctaacgttacgcgtggcgctatctactggcacttcgaaaacaagactcaactgtttaatgagatgtggttgcaacagccttcattgcgggagttaatccaggaacacttgacggctggattagagcatgacccgtttcaacaattgcgtgaaaaattgattgtcggcttgcaatatattgccaaaattccccgccagcaggcgttgctgaaaatcttatatcacaaatgtgaatttaatgatgagatgctggccgagggagtgatacgcgaaaagatgggctttaatccgcagactctccgcgaagtattgcaggcgtgtcagcaacaaggttgtgtagcaaataacctcgatttagatgttgtgatgattattattgatggtgccttcagcggaattgttcaaaactggttaatgaatatggcgggttatgatctttataaacaagcacccgcgctggtcgataacgtattaagaatgttcatgccagatgaaaacataacgaaattaattcatcaaacgaatgaattaagtgtcatgtaaattcacattctgtcctgaaaattcagttcgtcacagttaaccagttttagtggattaactgagttcatattgcggcatttgtctgtttctgttgccagcagttcaatccactgcatcagtaaagtatcaaacagaaaaacgaagacagcgaaaacgacgagccaccaatacttgcgaatcattacctgagcctgtgcatgtttaaccaagtctggcaggaaatatacacgaaatgaataatctgaaaaccaggcttacacttcctttactttgcaatgagatcggggtcaacttcgctaacccggcatcgttttgaccggttgcccgtctttctttttttcactttcgccagttcttccgcggagtaatgcgacgcgacatccagccgtcgaagccccattttgatgtactcgctgttgatctcaataccaatgaattttcgtccgctggcgatggctacggcaccggtagtaaagctaccggcaaacgggtcgagaacgatatcgcctgggttggaagaggcgagaataatgcgtttcagtaaggcttccggtttttgcgtcgggtggttctcatattcatccattaaataacgcacgcgcggaaaatcccagacgttacccggtactttttgatgattgtatggctgtggaggatttttgcgataatcgatcaacgcgcgctgcgatccggttttggcttctaccagaatagcatcaccgttgaatgtgtagttctttgcgtctttcaccatcatcaggatgggttcgtacatggagccgtagtgttttttcgcctgtactccagaactgtcatatgaccagacgatgcgacttttgatggtaaaaagcttgcggcactggagatcgataaagggcatgttttccgtactgttcataatgtacatgctgccctgctttttcagaacgcggtggcactctgcaatcacttcaaacagccagtcgataaacagatcttctttccaggcttcgatcagaccatcaaaatttttaccgatgttatacggtgggtcggcaaagatcagatcgacgctttcagtaggtagctttttaagttcggcaagggcatcaccgtgaataatggtcttagcttcattaccaaaccgggtcggttcacatcctgttctcatggtcactccctttgtgacacctataaaaaaggcgcttccccatgccgagtagcgcctttttaatcaagcatttagctaacctgaattagttcatgccgtattttttcaattttttacgcagcgtaccacggttgatgcccatcatcagcgcagcacgggtctggttaccacgggtgtattgcatcaccatgtccaacaggggctgttctacttcagccagtaccagctcatagaggtcattcacatcctgaccattcagttgagcaaaatagttcttcagtgcctgtttaaccgagtcacgcaggggtttttgggttacctgatcctgagagttaacggtagaaacggtcagtacgtcagaatttacgcgttgttcgaacatagttctgtcagctctttatttctgtttacgcaaaattttcgaagtatgcctccaacgcctccagctgttcgctggcatcctcaatggcgttgaatgtgcgccgaaactggtcatttggagcgtgttcctggagataccaggaaacgtgtttacgtgcaattcggtacccttttgccggaccataaaagtcatgcagttcccgaacgtgcgcgcaaagcaagcgcttaacctctgccaaaggcagcgggggcagcaactccccagtgtccagataatgctggatttcccgaaagatccagggtcttccctgagctgcgcggcctatcatcagggcatccgcccctgtatagtcgagcacagctctggctttaagcgggtcagtaatgtcgccattcgcgataaccggaatggaaactttctgcttaactgcccgaatactgtcgtactcagcttctccattgaacaaacaggcgcgtgtacggccatgaatggtcagagcctgaatgccacagtcttcagccagttgggcaatctcttcgcagttacggtgttccggtgcccagccggtgcgaatcttcagggtaacaggaacgtccactgcattgacgacctcggtaaggatcgatttaacgacatccgggtactgcaaaagggctgaacctgcgagcttgcgattcacttttttagccgggcaacccatattgatatcaataatctgggcaccgctttccacgttaatacgtgctgcatctgccatttctttcggatcgctaccagcaatttgcacggtgcgaataccgggttcatcaatgtgcaccatccgtaaacgagatttgtcgctttcccaaacctgtgggttagaagacatcatctcggatactgtcaatccggctcccatctcgtagcacaacgtccgaaaaggtctgtctgtaatgccagccatgggcgctgcgatcaggcgatttctgagctgatattgtccgatgcgcatgagttaagaaatgaccatactgtgactgcaaggcggcgtatattacgcattttttgcacgagatgaaaggccaaactttgaccaatcctctgagatggatcaaagaattgcatttaaaatgagcgtggtgcgataattactcataaaaatcatcatattagaaaatagtgactaaaatttacactcaaagaaatttgagtaagttctcaatttttctttatgaatgaaaattttggcacgcaaatttgcgtaaataatcggcaaatttacgtgccttttgtgagcttgctcgcacttcgccccgcgtcaccctacggcgatgcgaaggttaattcttacgaccggtaatgcggcaccactcttctttttccacgaccgggtccagtgcgaagctgtcgacataagcttcacaaacgctctctgcctggcttgccagaataccggaaaggcccagcaaaccgcctgaaaccggcaggacgctgattaacggtgccagttcacgtaatgggcctgcaaggatgttagcgaccaccacgtcggctttcatttcttctggctgatctttcggtaagtagagttccagacggtcagaaacgccattacgttcggcgttgtcgcggctggcctgaatcgcctgcggatcgatatcaataccaatggcttttgctgcacccagtttcagcgccgcgatcgccagaatgccggaaccacagccaaagtcgatgactgttttaccggttaaatcgaggctgtcgagccattgcaggcacagagaggtggttggatgggtacccgtaccaaacgccagccctggatctaacatcacgttgacggcgttttcgtccggcacatcacgccagctagggcagatccacagtcgttcaccaaagcgcatcgggtggaaattatccatccattcgcgctcccagtctttatcttctagttgttcgattttatgcgcgaagcctgcgccgagcagcggatggttttccagaatcgccaccacgtcgttcatatcggtttcagcgtcgaacagaccaatcacatcggtgtcgccccacaggcgcgtttcgcccggcagcggctcaaatactggcgtatcgtgggtatcctgaaaagtgatagaaacggcacccgcttccatcagcgcatcgctaagatcttccgcgttcgcgccggtggtgttcagtttcagttggatccaaggcatggcaaaactctttatttatcagtagtcaaaacggtagcttgcgggacggatgtaccgaaacggtttccgaccaggaaagccaccaaacttagtagtaacgagggcacgatagggtggaagcccaggtactgaatattcagcgtcgcgagtacggcatacagcacgccgccaacgatcatcgcacttagcgcgcctttggcgttggcgcgttcccagtaaagacccagcaccagcggccacaggaaaacggcttccagcccaccgaaggccagcaaattcagccagatgatcatttctggcggcttccaggcggcaagcagcagcaacgcgccgagaactaacgtaattaccgccgacatccgcttcagacgcgtctcgttttgcatttgatccggacggatattcagatagagatctttaatgatcgtagcggaactttgtagcaattgggcgttaattgtcgacatgatcgcagccataggtgcagccagaaagatcccggcagcaaacggtggcagcacttttaccattaacgtcgggatcaccagatccggtacggtgagatcggggatcactgcacgacctaacgctccggccaggtgcataccgaacatcaggattgcgactacaatcgtaccgatgatgatcccccggtgtactgctttgctgtctttataagagatacagcgcaccgcagtatgcggcaggccaatcacgccaaagcacaccagtacccagaacgacgtcataaaggcaggcgacagaatatcgtcagcgccttgtggcgtaaccagttgcggatcgatggtttgcaaggtctgtactgcgttgcttaagccgccagcggcatgtaccacgccaataagcagcacaacggtgccaatcagcatcacaagcccttgcatggtgtcgttcagcacgctggcgcgaaagccgccaaaggcggtatacaacgcaatgctgataccgaaaatcagcagcccggtttcataaggaatacccgccgcggtttccagcaggcgcgcaccgccgataaactgcacggtcattgccccaacgaacgcaaccagcaaactcaaactcgccagccacaccagaagacgactctggtagcgggcaaacagcatatcgttcagcgtcactgcattgtagcggcgcgcaagaatcgcgaacttcttgccgagaataccgagcgaaagccagactgcaggaagctgaatcatcgccagcaatacccaacccaggccgtatttataagcagctccaggcccgccgataaacgaactggcactgatataggtcgcggtgagcgtcatcgccagcacaataccgcccatagagcggctgccgaggaaatactcattaaggaaggtgccggtgctccgtttacgcatcgcataaaccgagataccgaacaccaccaccagataggcgaccagcggtagaattacttcaagctgcatcgtcatcctccagtgggatatcgcgatagataaatttcaccatcgcccagcacagtccaataaacagtagcggcgtcaggatgcaggctatctcaaaccagcgcggaaagccggtaaaaccgggggcaacgccaggtaagtaagcggctactaaccaaactgccagatacaaaagggtcagccccagcgcccagcgcgcctctttatgggcctgaacaaaacgagtgtccattttttgtccctgatgggtgaagaaagcgaggattgtaccttatgggggttgtcgatccccagtaataaaaaaggccggaaaatccggccttttgacgcttttgcagtcttatttttcctgaagaccgagttttttctccagatagtggatgttagtgccaccatgctggaagttctcgtcattcatgatgcggatctgcagatcaacattggttttgataccgtcgatgatcagctcctgcagcgcattcttcatgcgggcaatcgccacgtcacggttttcaccgtagcaaatcagcttaccgatcattgagtcatagtacggcggtacggtgtagcccgcgtagatatgagactcccaacgtacgccaaaaccgccaggtgcgtggaaacgggtgattttgcctgggcttggcaggaaggtgttcggatcttcggcgttgatacgacattccaccgcatggccgcgaacgtgaacttcttcttgcttgatcgacagcggttgaccggcagcgatacgcagctgttctttgatcaggtcaacgccggtgatcatttcggtaaccgggtgttctacctgaatacgggtgttcatttcgatgaaatagaactcgccgttttcgaacaggaactcgaaagtacctgcaccgcgatagccgatatcaacacacgctttagcgcaacgttcgccgatgtagcgacgcagttccggggtaatgcccggtgctggcgcttcttcgaccactttctggtggcggcgctgcatggagcagtcacgttccgccagatagatagcgttgccctgaccgtcagccagtacctgaatctcgacgtggcgaggattttccaggtatttctccatgtaaaccatatcgttgctgaaagcagctttcgcttccgcacgggtcatggagatggattgtgccagttcagcgtcgccgcgcactacgcgcataccgcgaccgccgccgccgccggaggctttgataatcaccggataaccaatgcgtttagcaatggcgcggtttttatccatatcgtcgcccagcgggccgtcagaaccaggtacgcaaggaacgcccgcttttttcatcgccgcgattgcggatactttgtcgcccatcaggcgaatggtttctgctttcgggccgatgaagataaagccggagcgttcaacctgctcggcaaagttggcgttctcggagaggaagccgtaacccggatggattgctactgcgccggtgatttcagcggcgctgatgattgccgggatgttcagataactttttactgacggagcagggccaatacagaccgtttcatctgccagtaatacgtgttttagatcgcgatccgcgctggagtgcacagcgacagtcttgatgcccagttctttacaggcacgaagaatacgcaatgcaatctcgccgcggttggcaataacaattttatccagcatgttcgcctcgttactcgatgacgaccagcggctcgtcaaattctaccggttgtccactttcgaccagaattgctttcacggtaccggatttgtccgcttcgatctggttcatcattttcatggcttcaacgatgcacagggtatcgcccacgttgactttctgacccacttcgatgaacgcttttgcgtccgggcttggggtgcggtagaaagtaccaaccatcggggaacgtacgatgtgaccactgatttccgctgctgctggcgcttccatggaaggaacggtcgccggagcggctgcgttagattgagctggctgctgcatcattggtgcagcgtaagcttgttgcatcacagggaaacttgcggcaggagctgcacggctaatgcgtactgactcttcgccttcagaaatttccagttcggagatgcctgattcttcaaccagctcgatcagttttttaatcttacgaatatccatgagtgggttccgtactctttgtttagtgtgattgtgacaggcgtttcaccgccgtctgtaaagcgtatgccccgacagctgtatgcatagcgataaattccagcaggccgggacgccggtctattttgccccagagtgtcaatgttagacttgacggacattgtgcagcgatctgctgctatcctccggcaaaaaacaaaatataccttcgttgcgccaatgtcaccttttccgcagcgcaaaaactgcgtcagggaggacgaggtcgcacattataacgatttcgtagcaattggcagctaaatactggtcttatcagggaagataatcaacagctaacatgtaaataaccttcaacaccgtgtaatttgcaacaagccgcacaattcacgaaattagcgccatcatcgacggaacttcttataacgtaaggtgaaaaactgtaaagccagccctgtgaagatgaggggctgcaatgagataatcttcacagaccacaaataatgtagggatgccaggatcgcgacaagatagacgacattacgcagcggttgctgaggattacccaattttcactgcatcgtctggatagacgtgaatgctaaagcacgcaaaatcaaccgactgacaatgctcagcattaaataggtttgagtggttaatttgtagtcaaataaaatcagattattcaccccatggtaccagaaataagtaaggggctaagcgtagcgtcgcccaggcaaagcaccataaacctaacaggcgacggaggcgtatcaataatagctgtttagtggagtatcaatgcgcatcaatttgtggtcagtcgaaatcatgactttacagtttggatgatgttgtataactttctgaccaaggtgttcgacgaaagctgtccggctaaccgcttttcccgttaaccgattgaataatgatttcaaaatgagttccctctcttattattccctgctaaatggttagttaaccttcaccagcgtgcgaccctggatctggttattaatgatggcctcggcaaagttcggtgcctctgacagagatatctcttttgccgcctgggtatagaatgattccggtaaatcggcgaccagtcgctgccaggcttgtgcgcggcgttctggtggcgtcattactgaatccaccccttgcaaacggacattacgcagaataaatggcatgaccgtggttggcagagtaaaaccacccgccagaccacaggcagccacgcagccgccgtaattcatttgcgccagcacttttgccagcactttgtcgccaacagtgtcaattgccccagcccagacttgtttttccagaggacgggattcggcaaactcatcacgagggagaatacgactggcacctaaacttttcagatattcatgggtactttcgcgaccggaaacggcaacgacctgataacccaacttatgcagcagcgccacggcggtactgccgacgccaccactggcacccgtcacgacaatctccccgtcctgcgggcgaacaccggcatcttccagcgccatcacacacagcatggcggtaaaaccggcagtaccgataatcattgctttacgcgcgtccagcccttgcggcatggcaaccagccagtcacctttcactcgcgcctgctccgccagcccaccccagtggttttcaccaacgccccagccagtgagtaacatctcctgaccggcatgaaaacgcggatcttcgctggtgcgtacagttccggcaaaatcgatcccaggaatcatcggaaaattacggatgatttttcccttaccggtaatcgccagcgcatctttatagttcaggctcgaccagtgaacatcaaccgtgacatcgccctccggcaggcgactttcgtcaagtgtctgtaccgatgcgagagttttgccgtcctgctgttctaaaagtaacgcctgcataagtggtcctcatgtgcatgatggattggaaaataatttctgaagactatactcgctaatggaaaagcaaagccgatgaagcgcaataaattgcgagataaatctgatttgctagtatgcccgcttcctcactatcggagttaacacaaggatgagattaacgacgaaattttcggcctttgttacgctgctcaccgggttaacaatttttgtgactttgctgggctgttcgctaagtttctacaacgcaattcagtataagtttagtcatcgcgttcaggcggtggcgacggcgattgatacccaccttgtgtcgaatgacttcagcacattaaggccacaaattaccgaattaatgatgtcggcagatatcgttcgtgtagacctgctccatggtgataaacaggtttataccctggccagaaatggtagttatcgtccggttggctccagcgatctgtttcgcgaactgagtgttccgttgataaagcatccggggatgtcgctgcgtctggtttatcaggatccgatgggcaactatttccattctttaatgactaccgcgccgctcacgggggcgattggctttatcattgttatgctcttcctggcggtacgctggttacaacggcaacttgccgggcaagaattgctggaaacccgggctactcgtatcttaaacggtgagcgtggctctaatgtgttgggaaccatctatgaatggccgcccagaaccagcagtgcgctagatacgctgcttcgtgaaattcagaacgcacgcgaacaacacagccgtcttgatacgcagatccgctcttatgccgcccaggacgtgaaaaccggcctcaataaccgactctttttcgataatcagttagcaacgttactggaagatcaggagaaagtaggtacccacgggatcgtgatgatgattcgtctgccggatttcaatatgttgagcgatacttgggggcacagccaggttgaagaacagttcttcactctgacgaatctgctgtcgacatttatgatgcgctaccctggcgcactgctggcgcgttaccaccgcagtgattttgctgcgctgttaccgcaccggacgttaaaagaggcagagagcatcgccggtcagttaatcaaagccgtcgataccttgccgaacaataaaatgctcgatcgcgacgatatgatccacattggtatctgcgcctggcgtagtggtcaggataccgagcaggtaatggaacatgcagagtctgccacgcgtaatgcgggattgcagggcggcaatagctgggctatttacgatgactcgttgcctgaaaaaggacgcggtaatgttcgctggcgtacgcttatcgagcaaatgctcagtcgcggcggcccgcgcctttatcaaaaaccggcggttactcgcgaaggtcaggttcatcatcgcgaactcatgtgccgcatcttcgatggtaatgaagaggttagctcggcggagtatatgccgatggtcttgcagtttggcttatcggaagagtatgaccgtctgcaaatcagccgtcttattccactattgcgttactggccagaggaaaatctggcgattcaggttaccgttgagtcgctgattcgcccgcgttttcagcgttggctgcgcgatacgttaatgcaatgtgaaaaatcacaacgaaaacgcataattattgaacttgcagaggccgatgtaggtcaacatatcagtcgtttacaacctgttattcgtttagtaaatgctttaggggtacgggtagccgtcaaccaggctggtttgacgctggtaagcaccagttggatcaaagaacttaatgttgagttactcaagctccatccggggctggtcagaaacattgagaagcgaacggagaaccagctgctggttcaaagcctggtggaagcctgctccgggaccagcacccaggtttgcgccaccggtgtgcgttcgcgaagcgagtggcagaccctgattcagcgcggtgttacaggcgggcaaggggattttttcgcgtcctcacagccacttgatactaacgtgaaaaaatattcacaaagatactcggtttaacctgccgtttaatccgttttcacgtagaataacgcgcgctgcgtctcatgggagtgtgcttgtctgctcgccagattgttgcagcacatatgcagatgaatgaccttacgcggttgcaaacaggcgaggaatgctgctgatgcattaagcctttctggactcaggcagagatttgtaacaaaggaaacgaactgcactaattttcaccgtagcagatgatttttgcgccttgtcgctgctgcgtgtggttggtaaagtaagcggattttcttttccgccccagctttcaggattatcccttagtatgttgaaaaaatttcgtggcatgttttccaatgacttgtccattgacctgggtactgcgaataccctcatttatgtaaaaggacaaggcatcgtattgaatgagccttccgtggtggccattcgtcaggatcgtgccggttcaccgaaaagcgtagctgcagtaggtcatgacgcgaagcagatgctgggccgtacgccgggcaatattgctgccattcgcccaatgaaagacggcgttatcgccgacttcttcgtgactgaaaaaatgctccagcacttcatcaaacaagtgcacagcaacagctttatgcgtccaagcccgcgcgttctggtttgtgtaccggttggcgcgacccaggttgaacgccgcgcaattcgtgaatccgcgcagggcgctggtgcccgtgaagtcttcctgattgaagaaccgatggctgccgcaattggtgctggcctgccggtttctgaagcgaccggttctatggtggttgatatcggtggtggtaccactgaagttgctgttatctccttgaacggcgtggtttactcctcttccgtgcgcattggtggtgatcgtttcgacgaagctatcatcaactatgtgcgtcgtaattacggttctctgatcggtgaagccaccgcagaacgtatcaagcacgaaatcggttcggcttacccgggcgatgaagtccgtgaaatcgaagttcgtggccgtaacctggcagaaggtgttccacgcggttttaccctgaactccaacgaaatcctcgaagcactgcaggaaccgctgaccggtattgtgagcgcggtaatggttgcactggaacagtgcccgccggaactggcttccgnnnnnnnnnnggcatggtgctcaccggtggtggcgcactgctgcgtaaccttgaccgtttgttaatggaagaaaccggcattccagtcgttgttgctgaagacccgctgacctgtgtggcgcgcggtggcggcaaagcgctggaaatgatcgacatgcacggcggcgacctgttcagcgaagagtaatcggatgcaggcaggggaaatgtctgtttaccctgcctggtctgatacgagaatacgcataacttatgaagccaatttttagccgtggcccgtcgctacagattcgccttattctggcggtgctggtggcgctcggcattattattgccgacagccgcctggggacgttcagtcaaatccgtacttatatggataccgccgtcagtcctttctactttgtttccaatgctcctcgtgaattgctggatggcgtatcgcagacgctggcctcgcgtgaccaactagaacttgaaaaccgggcgttacgtcaggaactgttgctgaaaaacagtgaactgctgatgcttggacaatacaaacaggagaacgcgcgtctgcgcgagctgctgggttccccgctgcgtcaggatgagcagaaaatggtgactcaggttatctccacggttaacgatccttatagcgatcaagttgttatcgataaaggtagcgttaatggcgtttatgaaggccagccggtcatcagcgacaaaggtgttgttggtcaggtggtggccgtcgctaaactgaccagtcgcgtgctgctgatttgtgatgcgacccacgcgctgccaatccaggtgctgcgcaacgatatccgcgtaattgcagccggtaacggttgtacggatgatttgcagcttgagcatctgccagcgaatacggatattcgtgttggtgatgtgctggtgacctccggtctgggcggtcgtttcccggaaggctatccggtcgcggttgtctcttccgtaaaactcgatacccagcgcgcttatactgtgattcaggcgcgtccgactgcaggactgcaacgtttgcgttatctgctgctgctgtggggcgcggatcgtaacggcgctaacccgatgacgccggaagaggtgcatcgtgttgctaatgaacgtctgatgcagatgatgccgcaggtattgccttcgccagacgcgatggggccaaagttacctgaaccggcaacggggatcgctcagccgactccgcagcaaccgacgacaggaaatgcagctactgcgcctgctgcgcccacacagcctgctgctaatcgctctccacaaagggctacgccgccgcaaagtggtgctcaaccgcctgcgcgtgcgccgggagggcaatagtggcgagctatcgtagccagggacgttgggtaatctggctctctttcctcattgcgctgttgctgcaaatcatgccctggccggataacctgattgttttccggccaaactgggtgttactcatcttgttgtattggatcctggccttgcctcatcgcgtaaatgtgggcacaggttttgtgatgggtgccatactggatctgatcagcggctcgacgcttggcgtacgcgtattggcgatgagcatcattgcttacctggtggcgctgaaataccagcttttccgcaacctcgcattatggcagcaggcgctggtcgtcatgttgctttcgctggtggtggatattattgttttctgggcagagtttttagtgattaacgtctctttcagaccggaagtgttctggagtagtgtagtcaatggggtgctctggccgtggattttcttgctgatgcgtaaagtccgtcagcagtttgcagtgcaataaaggtttctatgacttctctgtatttagcttccggttctccgcgtcgtcaggagttacttgcgcaacttggcgtgacctttgaacgtattgttacgggcattgaggagcagcgtcagccgcaggagagcgcgcagcagtatgttgtgcgtctggcgcgcgagaaagcacaggcgggtgtcgcgcaaacggcgcaggatctcccggtgctgggtgcggatactatcgttatcctgaatggagaagtgctggagaaaccgcgcgacgcagagcatgcggcgcagatgttgcgcaaattatcgggtcagacccatcaggtgatgacggcagtggcgttggccgacagccagcacattctcgattgcctggtggtcaccgatgtgactttcagaacgttaacagacgaagacatcgcgggctatgtcgccagcggtgaaccgttagataaagcaggtgcatacggtattcaggggctgggtggctgttttgtcaggaagataaatggcagctatcacgccgtagtcggcttaccgctggttgaaacgtatgaattattaagtaattttaacgcactgcgtgagaaaagggataaacatgacggctgaattgttagtaaacgtaacgccttcggaaacgcgagtggcgtatattgatggcggtattctgcaggaaattcatattgaacgtgaggcgcgacgcggaatagtaggcaatatctacaagggtcgtgtaagtcgtgtacttccgggtatgcaggcggcttttgtagatattgggctggataaagccgcgtttcttcatgcatccgatatcatgccgcacaccgaatgtgtggcgggtgaagaacaaaagcaattcacggtgcgcgacatctcggaactggttcgtcaggggcaagatctgatggtgcaggtggtgaaagatccgcttggcactaaaggtgcgcgcctnnnnnnnnnnatatcacgctgccttctcgctatctggtgtttatgccaggggcttctcacgttggggtttcccaacgtattgaaagcgaatcagaacgtgaacgcctgaaaaaagtggtcgcagagtattgcgacgagcagggcgggtttatcatccgtaccgcagcggaaggggttggcgaggctgaactggcctccgatgccgcttatctgaaacgcgtctggaccaaagttatggagcgtaaaaaacgcccgcagacccgttatcagctgtacggcgaactggcgctggcgcagcgtgttctgcgtgatttcgccgacgccgaactggaccgcattcgcgttgactcacgcctgacttacgaagcattgctggagtttacctcggagtacattcccgagatgaccagcaagctggagcattacaccggacgccagccgattttcgatctctttgatgtcgaaaacgaaatccagcgagcgctggaacgcaaagtagaactgaaatccggtggttatctgattatcgaccagaccgaagcgatgaccaccgtggacatcaataccggagcgtttgtcggtcatcgcaatcttgacgacaccattttcaataccaatattgaagcgacgcaggctatcgctcgccagttacggttgcgcaatctgggcgggattatcattattgatttcatcgatatgaataatgaagatcaccgccgccgagtgctgcactcgctggagcaggcgttgagcaaagaccgggtgaaaaccagcgttaatggtttttcggcgctggggctggtggagatgacgcgtaaacgcacccgcgaaagcattgagcacgtactgtgtaacgaatgcccaacctgccacggtcgcggaacggtgaaaaccgtggaaacggtatgctatgaaatcatgcgcgagattgttcgtgtccaccatgcttacgactccgaccgtttcctggtctatgcttctccggcagtagctgaagccttgaaaggcgaagagtcacactcgctggcggaagtggaaattttcgttggcaaacaggttaaagtacaaattgaaccgctctataaccaggagcagtttgacgtcgtaatgatgtaaacagatgctgggccgccatccggcaaagggtttttgagtcacatttttagcagacaaggagtgacgggtgaggcgattgccggggattttactgcttactggagccgcgctcgttgtgatcgctgccctgctggttagcggcctgcgtattgctttaccgcatcttgacgcctggcgtccggaaatcctcaacaaaatagaatccgcgactggcatgccggtagaagccagtcagctctcagccagctggcagaattttggcccgacgcttgaagcacacgacatccgtgcagaactaaaagatggcggcgaattttcggttaaacgcgttactctggcgctggatgtctggcagagcttgttacatatgcgctggcagtttcgcgacctcactttctggcagctgcgctttcgcaccaacactcctatcaccagcggtggtggtaatgatagcctggaagccagtcacatcagcgatctgtttcttcgtcaatttgaccatttcgatctccgcgacagtgaagtcagttttctgacgccatccggtcagcgcgccgagctggcgatcccacaactcacctggctgaacgatccacgtcgacaccgtgcggaaggcctggtaagcctctccagccttaccggacagcacggcgtgatgcaggtgcgtatggatttgcgcgatgatgaggggttgttaagcaatggtcgcgtctggctacaggcggatgacatcgacctgaagccgtggctcggtaaatggatgcaggacaatattgctctggaaacggcacagttctcccttgaaggctggatgacgatcgacaaaggcgatgtaaccggcggtgacgtctggctgaaacagggcggtgccagctggttgggcgagaagcaaacgcatacgctgtcggtggataatctgaccgcgcatattacgcgtgaaaatccgggctggcagttctctattcccgatacacggatcacgatggacggcaaaccctggccgagcggagcattgacgctggcctggataccggaacaggacgttggcggcaaagacaataaacgcagtgacgaactccggattcgcgccagtaatctggagctggcaggcctggagggcgtacgcccgctggccgcgaaactttcacctgcactgggtgatgtttggcgctccacacaaccgagcggcaagattaacactctggcgctggatatcccgcttcaggcggcagacaagacccgttttcaggcatcgtggagcgatctggcctggaagcaatggaaattattaccgggtgcggaacacttctccgggacgctttccggcagcgttgaaaatggtttgcttaccgcgtcgatgaagcaggcaaagatgccttacgaaacggtattccgtgcgccactggaaatcgccgacggccaggcaactataagctggctgaacaatgacaaaggtttccagctggatgggcgtaatattgacgttaaagccaaagccgtccatgcgcgcggcggttttcgttacctgcaacctgctaacgatgaaccctggctgggtattctggctggcatcagtaccgatgatggttcacaagcctggcgctatttcccggaaaacttgatgggtaaagacctggttgattatttaagtggtgcgattcagggcggtgaagcggataacgcgacgctggtttatggtggcaatccgcaactcttcccctataaacacaacgaaggtcagtttgaagtgctggtgccgctgcgcaacgcgaagtttgccttccagccggactggcctgcattaactaaccttgatattgaactggactttattaacgacggtttatggatgaaaaccgatggcgttaatctgggcggcgtgcgcgcgagtaatctcaccgcagtgatccctgactactcaaaagaaaaactgctgattgacgctgacattaaaggtccgggtaaagccgtaggcccttactttgatgagacaccgctgaaagattccctgggtgcgaccctgcaagaactccagctcgacggcgatgtgaatgctcgcttacatcttgatatcccgctgaacggcgagctggtaaccgcgaaaggtgaagtgacgctgcgtaataacagtctgtttatcaaaccactcgacagcaccctgaaaaatttgagcggtaaattcagctttatcaatggcgatctgcaaagtgaaccactgacagcaagctggtttaatcagccgttgaacgtggatttttccaccaaagaaggggcaaaagcctaccaggttgcggtgaatctcaacggtaactggcaaccggcgaaaaccggcgttttgcctgaagcggtgaacgaagcattaagtggcagcgtggcgtgggatggtaaagtgggcattgatctgccttatcatgctggcgcgacctataacgtagagctgaacggcgatctgaagaatgtgagtagtcacttaccttcaccgttagccaaacctgcgggtgaaccactagcggtaaacgttaaggttgatggcaatctcaacagctttgaattaaccggacaggctggtgcggataaccatttcaatagccgctggttgcttggtcaaaagctgacgctcgatcgtgctatttgggcggcagacagtaaaacgctcccgccgttgccggaacaaagtggcgttgaactcaatatgccgccgatgaatggtgccgagtggctggccctgttccagaaaggcgctgcggagagtgtcggtggtgcagcgagtttcccacaacacataacgttacgtacgcctatgttgtcactgggaaatcagcaatggaataacctgagtattgtttcgcaaccgacggcaaatggcaccctggttgaggcgcaagggcgtgaaatcaacgccacgctagcgatgcgtaataacgcgccgtggctggcgaatatcaaatatctttattacaacccgagcgtggcgaaaactcgtggtgattcaacgccgtcatcacctttcccgacaacggagcgcattaacttccgtggctggccggacgcccaaatacgatgcacagagtgctggttctgggggcaaaaattcggtcgcattgacagtgatatcaccatttctggcgatacgttaacgctgaccaatggactgattgatactggtttctcgcggcttactgccgatggtgaatgggttaataatccggggaatgaacgtacctcgctgaaaggaaaactgcgcgggcagaaaattgatgccgccgcagaattttttggtgtcacgacgcccatacgccagtcgtcatttaatgtggattacgatttacactggcgcaaagcaccctggcagccagatgaagcgacgttgaatggcatcattcatactcaactgggtaaaggcgaaattaccgaaatcaataccggacatgccgggcaattgctgcgcttattgagcgtagatgccctgatgcgtaagctgcgttttgatttcagagacacttttggcgaagggttttattttgactccattcgcagcaccgcgtggattaaagacggcgttatgcacaccgacgacacgctggtggatggcctggaggcggatatcgccatgaaagggtcggtaaatctggtacgtcgcgacctgaatatggaagcggttgtcgcaccagagatttctgcgacggtgggcgtggctgcggcttttgcggttaaccccattgttggcgcggcagtgtttgccgccagtaaagtgctggggccgctgtggagcaaagtctccattttgcgctatcacatttcgggtccgctggacgatccgcaaatcaacgaagtgttgcgccaaccgcgtaaagaaaaagcgcaatgatttgacgagggcgcgtaattgccccaatctcatatgataatcgttgccaaaggccaacgagccagaacataaccgtaggtcggatagggcgttcacgccgcatccggcagccgtaaaaaatcctctactgcagtaactaacgagtagcaaaaacgatgagtcttaacctggtaagtgaacaattgctagcggcgaacggcctgaaacatcaggacttgttcgcgatcctcggtcaactggccgaacgtcgccttgattatggcgatctctattttcagtcgagctatcacgaatcctgggttttagaagaccgcattattaaagatggttcttacaacatcgatcagggcgttggtgtgcgtgcaatcagtggtgaaaaaaccggatttgcttacgctgaccaaatcagcctgctggcgctggaacagagtgcgcaagcggcgcgcaccatcgtccgtgatagtggtgatggcaaagtacagacgctgggcgcggtagagcatagcccgttgtatacctcggtagatccgctgcaaagcatgagccgtgaagagaagctggatatcctgcgtcgcgtcgataaggttgcccgcgaagcggacaagcgcgtacaagaagtgactgccagcctcagcggcgtttatgaattaattctggttgcggccaccgacggcacgctggcggcggatgttcgtccgctggtgcgtctttccgtgagcgttctggtcgaagaagatggcaaacgcgaacgcggtgccagtggcggcggcggtcgttttggttatgagttcttccttgccgatcttgacggcgaagtccgtgcggatgcatgggcaaaagaagcagtgcgtatggcgctggtcaatctttctgccgttgctgcaccagcgggcaccatgccggtagtacttggcgcaggttggccgggcgtgctgttgcatgaagcggtaggtcacggtctggaaggcgacttcaaccgccgcggcacttcagtatttagtgggcaggtcggggagctggtggcttcagaactgtgtaccgtggttgatgacggcacgatggtcgatcgccgtggttcggtggcgattgatgacgaaggtacgccaggccagtacaacgtgctgattgagaacggcattctgaaaggctacatgcaggataaactcaacgcgcgtttgatggggatgacgccgactggcaacggtcgccgtgaatcctacgcccatctgcccatgccgcgtatgaccaacacctatatgctgccgggtaaatcgaccccgcaggaaattattgaatccgttgagtacggtatctatgcaccgaactttggtggcggtcaggtggatattacatccggcaaattcgttttctccacttcagaagcgtatctgattgaaaacggtaaagtaacgaagccggtgaaaggcgcgacgttgattggttccggtatcgaaaccatgcagcagatttcgatggttggcaacgacctgaaactggataacggcgtgggtgtctgcggtaaagaagggcaaagtttgccggttggcgtgggccagccaacgctgaaagttgataacctgactgttggcggtactgcgtaataatttcattattttcagaaggataattaatctttctacgtgcacgaacggtcccctcgctcctctggggttagggtgaggggaacccgttggcacaggtttgtagaacgtaacagtacaatatgaattacttctctttcccgcgcccgtgcatctcctgaaacaatttaccgacctcaacaaaataatccgtcagcgagttgatcacgacctgtaccttcagcggcagcttatctttttcggtatataacgcataaaccgggcgtggatctgactggtaacgtggtagcaggatctccagctccccgcgattgatctcgttgatcacccacatcagcggcacgtaggcgatcccagcgcctgcagtcagccagcgcaccagcgtcatcggatcattagtcacaaatctcccctgcgggatcaggcgagtcgagatcccttccggtgcgatcagttcaaattcattgtcgggccgcacgctgtattcaagccatgaatggctacttaaatcggcgggtttttccggtatgccgtattgtgtgagatagctttttgcggcgcacaccaccattggcatcgcgcccagacggcgggaaaacaggctggaatcctgcaacgcgccgacgcggatcaccacatccagaccgtcggcaatcaggtcgggggcaggaattccggtaaccagattgacgctcaaacctgggtattctttcagcatttttgctgtcagcccggcgagaacattttgtgccatagttgaagaacagccaatgcgcagcgtcccgatgggggtgttattgaaggcatacagttgctcatgaacatcctgcacttcatgaagcatacgacggcagccctggtagtaaattctaccggcttcggtcaggccaatgctgcgtgtgctacggtttaacagctttacctgcaactcatcttccagttttgacaccgtctgactgatggacgaaacgctcatctgtagctgtctggcggcggcggtaaaagagccaaattcaactactttggcaaacaccgacatgcgttttagtcgttccattattcactctgacttaaaagtgatttagatcacataatatagataacagcataacagttacgctaatatattaaatatcaatctacagcaatgttgctctcgcccggctttccatgcccttctctgcggcgacagatgctgaaaataataacgcctgctctctctttacaaccaaggtcaacatgagtctgtttcccgttatcgtggtgtttgggctgtccttcccaccgatattttttgaattgcttttatcactggcgattttctggctggtgcgccgggtacttgtgccaacaggtatctacgactttgtctggcatccggcgttgttcaacaccgcgctctattgctgcttgttttatttgatatcgcgactgttcgtttgaggttgaagtgaaaacactaataagaaaattctcccgtacggccatcacggtcgtattagtcattctggccttcatcgcaatttttaatgcctgggtctattacaccgaatccccctggacgcgtgacgcgcgctttagcgctgacgtcgttgcgatcgcgccggacgtttctggactcattacccaggtgaatgttcatgataaccagctggtgaaaaaaggacagatactgttcaccatcgaccagccgcgctatcaaaaggcgcttgaggaagcgcaagccgatgttgcttattatcaggtactggcacaggagaaacgccaggaggccggacgtcgtaaccgtctcggtgtgcaggcgatgtctcgcgaagagatcgaccaggctaacaacgtactacaaacggttctgcatcagttagcgaaagcgcaggcgacccgcgatctggcaaaactggatcttgaacgcacggtgatccgcgcgccagcagatggctgggtgaccaacctcaacgtctataccggtgagtttattactcgaggatcaacggcggttgcgctggtgaaacagaactccttctatgtactggcctatatggaagaaactaagctggaaggggtgcgtccggggtatcgtgcagagatcacgccgcttggcagtaacaaagtgctgaaagggactgttgatagtgttgccgcaggggtcaccaacgccagcagcacgcgtgacgacaaagggatggcgactatagactctaaccttgaatgggtgcgtcttgcgcaacgtgttccggttcgtattcgtctcgacaaccagcaagagaacatctggcctgcgggcaccactgctacagtggtggtcactggcaaacaagatcgcgacgaaagccaggattcgttcttccgtaaaatggcccatcgcctgcgtgagtttggttaatcacgatgggtattttctccattgctaaccaacatattcgctttgcggtaaaactggcgaccgccattgtactggcgctgtttgttggctttcacttccagctggaaacgccacgctgggcggtactgacagcggcgattgttgccgccggtccggcctttgctgcgggaggtgaaccgtattctggcgctattcgttatcgtggctttttgcgcatcatcggcacatttattggctgtattgccggactggtgatcatcattgcgatgatccgcgcaccattattgatgattctggtgtgctgtatctgggccggtttttgtacctggatatcctcgctggtacgaatagaaaactcgtacgcgtgggggctggccggttataccgcgctgatcattgtgatcaccattcagccggaaccattgcttacgccgcagtttgccgtcgaacgttgtagcgagatcgttatcggtattgtgtgtgcgattatggcggatttgctcttttctccgcgatcgatcaaacaagaagtggatcgagagctggaaagtttgctggtcgcgcaatatcaattaatgcaactctgtatcaagcatggcgatggtgaagttgtcgataaagcctggggcgacctggtgcgacgcaccacggcgctacaaggcatgcgcagcaacctgaatatggaatcttcccgctgggcgcgggccaatcgacgtttaaaagcgatcaatacgctatcgctgacgctgattacccaatcctgcgaaacttatcttattcagaatacgcgcccggaattgatcactgatactttccgcgaattttttgacacgccggtagaaaccgcgcaggacgtccacaagcagctcaaacgcctgcggagagttatcgcctggaccggggaacgggaaacgcctgtcaccatttatagctgggtcgcggcggcaacgcgttatcagcttctcaagcgcggcgttatcagtaacacaaaaatcaacgccaccgaagaagagatcctgcaaggcgaaccggaagtcaaagtagagtcagccgaacgtcatcatgcgatggttaacttctggcgaaccacactttcctgcattctgggcacgcttttctggctgtggacgggctggacttccggcagtggtgcaatggtgatgattgcggtagtgacgtcactggcaatgcgtttgccgaatccacgcatggtggcgatcgactttatctacgggacgctggccgcgctgccgttagggctgctctactttttggtgattatccctaatacccaacagagcatgttgctgctgtgtattagcctggcagtgctgggattcttcctcggaatagaagtacagaaacggcgactgggctcgatgggggcgctggccagcaccataaatattatcgtgctggataacccgatgactttccatttcagtcagtttctcgacagcgcattagggcaaatcgtcggctgtgtgctcgcgttcaccgttattttgctggtgcgggataaatcgcgcgacaggactggacgtgtactgcttaatcagtttgtttctgccgctgtttccgcgatgactaccaatgtggcacgtcgtaaagagaaccacctcccggcactttatcagcagctgtttttgctgatgaataagttcccaggggatttgccgaaatttcgcctggcgctgacgatgattatcgcgcaccagcgcctgcgtgatgcgccgatcccggttaacgaggatttatcggcgtttcaccgacaaatgcgccgcacagcagaccatgtgatatctgcccgtagcgatgataaacgtcgtcggtactttggtcagttgctggaagaactggaaatctaccaggaaaagctacgcatctggcaagcgccaccgcaggtgacggaaccggttcatcggctggcggggatgctccataagtatcaacatgcgttgaccgatagttaagtcaaaaccgacgccaaaagcgtcggttttttcatggctatacttagcgatgaacggcagaactcgccgcgaaacgtgacggtggcaacagatgaatatttatacctttgattttgatgagattgagagtcaggaggatttttatcgcgacttcagccaagcctttggtctggcgaaagataaggtacgcgatctcgactcactatgggatgtgttaatgaacgatgtcctgccgctaccacttgagattgaatttgttcatctgggagagaaaacgcgtcgccgttttggcgcgttaatattgctgtttgatgaggcagaggaagagctggaagggcatttgcgttttaatgttcgtcattagcgcaaaaaaaagcccccgaaccgggggcaatatcgtcggacaagacgatgagggtttatttgtacagttcagccgtagcgtgccaggtgtcaccgctacgagcttcagtaatctggtaggccgttgcgcctttctcttccgcttttttgttcagcatttcacgtatatccattggcgaagacgccacaccacttacggatacggtcccgattgcttcacggttttgtgcttgtgcagcatcaatggagtcggcagcgaatgcaccgaaagagagaacagaaagtacgcttaatgcagcaacagtggttttgattttcatgatttttacctcgacataatctttttgctgggtctttgtttcgtgacccttatcacaaaatcaagtatacactaattattgaactaattaataccacgctaactg

SEQ ID NO: 211 - DNA, 27626 bp, Escherichia coli
  source 1..27626: mol_type = genomic DNA
gagttgccaaaccatactcctctggactgaaacatcctgattaattttcgctactacatagcctaacagatagatcatcacttttccggcaacaatcgaccgcatcatggctaactggaatttttaattcatggcaattagcggcaatggaatataaaattcactcgcgtgtctctcatattgcctgttgtcgccactatttcatcgcgaggaaagatatgaacggcttacttcgtatccgtcagcgttaccaggggcttgcccagagtgataaaaaactggcggattatctgctgctacaacctgatacggcgcgccatttaagctctcagcaactggccaacgaagccggagtcagtcagtccagcgtcgtgaagttcgcgcaaaaactcggctataaaggttttccggcgcttaagttggcgttgagtgaagcgctggcaagccagccggaatcgccctccgtgcccattcataaccaaatccgcggtgatgatccgttacggctggtcggcgaaaaactgattaaagaaaatactgccgctatgtacgcaacgctaaacgttaatagtgaagagaaactgcatgaatgcgtaacaatgttgcgctctgcgcggcggataattctgaccggtattggcgcttcgggtctggtggcgcaaaactttgcctggaagctgatgaagattggcttcaatgctgccgcagtgcgcgatatgcatgcgctactcgcaacagtacaggcgtcgtcccctgacgatctgttattagccatttcctacaccggtgtacgacgcgagttaaacctggcggcagatgagatgctgcgagtgggcggaaaagtgctggcgattaccggctttactccgaatgccctgcaacagcgtgcttctcattgcctgtataccattgccgaagaacaagcgacaaacagcgcttcaatctctgcttgtcacgctcagggaatgttaacggatttgctgttcattgcgctgattcagcaggatctggaactggcaccagaacgtattcgtcatagtgaagcgctggtgaaaaaactggtctgagtaaagaatgcgcgtataatgcccgcccggtttgtgttgttttgagagtttccttatggcgttgttaatcactaaaaaatgcatcaattgtgatatgtgtgaacccgaatgcccgaatgaggcgatttcaatgggagatcatatctacgagattaacagcgataagtgtaccgaatgcgtagggcactacgagacaccaacctgccagaaggtgtgcccgatccccaatactattgtgaaagatccggcgcatgtcgagacagaagaacagttgtgggataaatttgtgctgatgcaccacgcggataaaatttaatattctactctggaagtagagtattaattatattactgggaagccttaacgccattatatttatttaattgatgacattagcataatcattcactaagttaatttatatagtatctgccaagacacttatttatagttattaaaggcgcgtccgattggttcaccggacgcaccttaagtacgtttccttgtgttataagaacagaaggatcagctgtaaaacagcaatgatgattttgatgacccgtttaatcaggtatcggcaatcagtcattcgtttttccttaaacaaggaatgcagccgttcagattagcccttacatctccccaaaactgaacgtgcgagttattgagggtgcatgctgcactccacaccagagctttgacgacaccactcgtttcaatgggggaattctgtggcatggtgtaaagcacagcaaaatcttcaataacgaagccaattttaatgtacttacgaattggcggtcacgttaatctttccatcaatattgctttcttcgtaaaggctcgagtttttatgctaaagattgcaagttgcttgtaaaagataagtacactgatccataatcgctgttgttgagggtgcatgctgcacaaaattaaagttaaaaagtaaaacccccgttccttaccagttcgggggttttactttttaaagagaacggtattatttttaactttcaataattaccgtggcacaagcatagtgccgctcatctgccagcgttacatgcatatttgcaacgcccagcttttccgccagttttaatgcctcgccccatagccgtagccgtggtttgccgagctcatcattgaatacttcaaattgattaaacgccagaccattgcggatcccggtgccaaacgcttttgctgcggcttctttcacagcaaaacgcttcgccagaaaacgcaccggctggtggtgcgttttccagatagcccattcgttatcgcttaatacgcggcgtgccaggcgatcaccggatcgggcgatcaccgcttcgatgcgagcgatctccacaatatccgtgcctaaacctaatattgccattagccacgcgcttccagcatcagacgcttcatttctgccaccgcatctttcagtccggtcatcactgcacgaccaataatggcatgaccgatattcagttcatgcatctcagggatggcggcaatggctttcacgttgtgataggtcagaccgtgtccggcgttaactttcagaccgaggcttgcggcaaaggtcgcggctttggcgatacgcgccagctcttgcgcctgttcggcgtcagttttggcatcagcatagcaaccggtgtggatctcgataaacggtgcgccaacctctgccgcagctttgatctgctcttcatcggcgtcaataaacagagaaacctgaatcccggcatctgccagacgtttgcaggcatcgcgcattttgtcacgctgccctgcgacatccaggccgccttcggttgttacttcctgacgcttttccggtaccaggcagcaaaaatgtggcttcgtctcaacggcgatcgccagcatctcttcggtcaccgccatctccagattcatgcgggtatccagcgtctgacgcaggatgcgcacgtcgcggtcagtaatgtgacggcgatcttcacgtaaatgcacggtaatgccgtccgctcccgcctgctcggcaataaacgcggcctgcaccggatccgggtaagcggtaccgcgcgcgttgcgcagcgtagcgatatggtcaatgttgacgcctaacagtaattcagccatgacaatcctcatcattcataatgtgttttcaccgttcgcttaggcataaattgccggaacagttccctgctctttaaaggtttaccgccaagatacggcttaagcgccatgcgggtaaagcgtttcgcagcgcgcagtgtgtctgcgtcaggaaattcccgtgcgtttaacgcttttaactgccttccggtgaacgttttattgtcgataacgacgcttgcgataaaccctttttcttcgcgataacgatacgtcatggtgtcatctaccggctcgccgctacccgcacaatgggtaaaattgacgccataacccagatgcccgagcagtgccagttcaaagcggcgcagcgcgggttctggcgtaccagtgacccctgcaagagactgaatgcagtgcaagtaatcgaaaaaaagttcagagaagcgcgtctcgtattccagtacgcgggagagaagttcgttgatgtacagaccgctgtaaagcgtgataccgcttaatggcagcgccagcgagacggcttcagcactgcgcagcgttttgacttcgccacgcccgccaaaacgtagcaagagaggggtgaaaggctgtaatgcacctttcagggtagagcgtttagagcgtgcgcctttggcaaccagacgcacgcgccccgattcctccgtgaagacgtccagcatcaggctggtttcgctccacgggcgactatgcaggacaaatgcgcgctgccagccttccatcggagttactcttaaagatcgtcaacgtaaccgagactgcgcagtgcgcgttcgtcgtcggcccaaccggatttcacttttacccacagttcaaggtgaacaggcgcttcgaacatttcctgcatgtctttacgcgcttcaatcccgatggttttgatcttggcccctttgttgccaatgaccatcttcttctgcccttcacgctcaacgagaatcaaaccgttgatgtcataaccaccgcgttcgttagagacgaaacgttcgatctccacggtcacggagtacggcagttcagcgccgaggaaacgcatcagtttttcgcggatgatttcagacgccataaaacgctgtgagcgatcggtgatgtaatcttccgggaagtgatgagtcgcttcaggtagatgcttacgcacgattgccgcaatagtgtcaacattcagcccggtttcggcagagattggcacgatatcgaggaagttcatctggcttgccaggaactgcaggtgcggcagcagatcggctttctcctgcacgttgtccactttgttcaccgcgaggattaccggcgctttgccttcgcgcagtttgttgagcaccatttcgtcgtccggcgtccagcgggtgccttcaacgacaaaaatcaccagctcaacatcgccaatagagctgctcgccgctttgttcatcaggcggttaatggcgcgtttttcttccatatgcaggcccggtgtatcgacgtagatcgcctgatacgcgccttcagtatggatccccacaatgcggtgacgagttgtctgcgccttgcgggaagtgatggagattttctgccccagcagtttgttcaacaatgtggatttgccaacgttcggacgtccgacgatggcaataaatccgcagtaacttttatcgatgctcattccagctccagttttttcaacgcctgttcggcggcagcctgctcagccttacgacggcttgaacctgtgccaaccaccggttcactcaggccgctgacctggcagtggatagtaaattcctgatcgtgcgcttcgccacgtacctggactaccagataagtcgnnnnnnnnnngatggcgaccctgcaaatattcttgcaagcgcgttttcggatctttttgtttatcgcctgggctaatttcgtccaaacgagtttgataccagttgaggattaatttctcgacggtttgaatatcactgtcgaggaatacgccaccaattaatgcttcgacggtgtcggcgagaattgactcacgacgaaatccaccgcttttaagttcacctggccctaaacgtaagcactcgcctaactcaaattcgcgcgccagttccgccagcgtattgccacggaccagcgtggcgcgcatccggctcatatcgccttcatccacacgagggaaacggtgataaagcgcattggcgataacgtagctcagaatagagtcgcctaaaaattctaaacgctcgttatgtttactgctggcactacgatgagttaatgcctgctgcaacagttcctgatgattaaaagtgtagcccagcttccgttgaagccgattaattacgatggggttcatgcgataccaataaataaatgcgtcaacaattcagcacacgaaacagacctgatatacatggttctgctaactgcttcgctgcagtttcagtttaccggtatatggggaccaacgctgtttcgtgtgccgtggcaacctggaggtgccaaccttaaacttcgggggaatattctatacacaacgacgggggatgtcgttagccacgggagatttatctcataaataattcacgttgtcgccataacggcgacaacgtgaacgaagatggctattaatggatgccgccaatgcgacttaagcgcagaccagtcggccattcgccttcttgcttatcgaagctcatccagatagccgttgcccgaccgaccagattcgcttccggcacaaagccccagtaacggctgtccgcgctgttgtcgcggttgtcgcccatcatgaagtattgtcccggaggaacaatccaggttgccagttgttgccctggctgctggtaatacatccccacctgatcctgcgcaatcggcactgtcagaatgcggtgcgtcacatcacccagtgtctctttacgctcggaaagacgaattccattttctttggtttcgtttttcggcacttcaaagaatccgctggtcgcttccccaccattacggcgtgagaaggtctgaacgaaatcgctcggttccacgtttgagtaggtgaccggcagcgcgttttcacacgcctggccggaactgcatcccggttgaatcgtcagctcttttgagaccggatcgtaagtgactttatcgcccggtaaacccaccgcgcgcttgatgtaatcaagctttggatcttccggatatttaaagaccacgatatcgccgcgtttcggatgaccggtttcgatcagcgttttctggtagataggatctttaatgccataagcaaacttctctaccagaataaaatcaccaattaacagagtcggcatcatcgaacctgacgggatctggaacggttcataaataaacgaacgcacaatcaatacgatagccagtaccggaaaaacagaagcaccggtttccagccagccaggcttcggcgcaacctttttcaacgttgctttatccagtgagtcaccggcagccgcctgcgccgctgcctgacgttcccgccgtttaggtgcgaaaaagaatttatccacgcaccataaaatgcccgtcaccagtgtggcaatcaccagaatcagggcaaacatattcgccatgccaactcctaagggttatttgttgtctttgccgacgtgcagaatggcgaggaacgcttcctgcggcagctcgacgttaccgatctgcttcatgcgtttcttaccttctttctgcttctgcagcagctttttcttacggctgatatcgccgccataacatttagccagtacgtttttacgcagctgtttcacggtggatcgcgcaataatgtgcgtaccaatcgctgcctgaatggcgatatcaaactgctggcgtgggatcagatctttcatcttctccaccaactcgcgaccgcggttttgcgaattatcacggtgggtgatcagcgccaacgcatcaacacgttcaccgttgattaatacgtctacacgtaccatgtcggacgcctggaagcgtttgaagttgtaatccagagacgcataaccacgcgaggtagatttcaggcgatcgaagaagtcgagcaccacttccgccatcgggatctcgtacgtcagcgccacctgattaccgtggtaaaccatattggtctgcacgccgcgtttttctacgcacagcgtaataacgttgccgagatatgcctgcggcagcagcatgtgacattcggcaatcggctcgcgcagttcgtagatgttatttaccgctggcagcttggatggactgtcgacgtaaataacttctcttgacgtggtttcaacttcatacactacggtcggcgcagtggtgatcagatccagatcgtattcacgttccagacgttcctggatgatctccatgtgcagcaggccgaggaagccgcagcggaaaccaaagcccagcgcgctggagctttccggctcatagaacagtgaagcatcgttcaggctgagtttacccagcgcgtcacggaaggcttcatagtcgtcggaacttaccgggaacagaccggcgtatacctgcggtttgactttcttaaagccaggcagcgccttttctgccggattacgcgccagcgttaaggtatcgccgactggagcgccgtggatatctttaatcgcacataccagccagcctacttcgccacatttcagttcagtgcggtcaacctgcttcggcgtgaagatgcccagacggtcggcgttataggtctgcccggtactcatgactttcactttgtcgcccttacgcagggtgccgtttttaatacggataagtgaaacaacgcccagatagttgtcgaaccaggagtcgataattagtgcctgcaacgggccttccggatcgccttccggcggcggaatgtcgcgcaccagacgttcgagaacgtcctgcacgccaacgccggttttcgctgaacagcgcaccgcgtcggtggcgtcgatgccgacgatatcttcaatttcttccgccacgcgttcaggatcggctgccggcaggtcaatcttgttcagtaccggcaccacttcgagatccatttccatggcggtgtagcagtttgccagggtttgcgcttctacgccctgcccggcgtcgaccaccagcaatgcaccttcacaggcagccagcgaacgggaaacttcataggagaagtctacgtggcccggggtgtcgataaagttaagctgataggtttcgccgtcagacgctttgtagtccagcgtcacgctttgcgctttgatggtaatgccacgctcacgctcaagatccatggaatcgagaacctgcgcctccatttcacggtcagacaggccaccgcagatctggataatacggtcagacagcgtcgatttaccgtggtcaatgtgagctatgatcgaaaagttacgtatattcttcataaagtatgattattgtgccttaatgcccggttaaccaggcttttagaagtcgctgttctgagcttaacgtctgtattaatagaaacgccgcattctacactacaacattgaggcgaggaaatgttcataccgtatggattgtggtatctggaaacgtcctcgcatttgttatgcaaaatgcaataaagccagtgaaatcactggctcgcgtcttccgaagatgtttcaaatcgcacaaggccaggcggcaatgccacgcttaagatgatcggttgccattctgcccgggcagcaaacttacgcgagtagccgcgcgcaatcaggaacccgccaataccaccgaggatcgcaccacataatgctgcgacgtcagaagcaaagagtagctgaaatagcgaagcgatgaggaataatcccaccagcggcgacatataaaccagtaatgcggagctaagcaggctgccttcggcgatccccaattccactttttgccccggcactaacggctcatcacagggtacgacaatggtatgcgtggtttgcgggccaagtttatttaacacgcggctaccgcaaccggcgcgtgaagcgcagctgctgcatgaagctttaacatcacaactgaccagcgcctgcccgttttgccaggagacgacggtagcccactctttgatcattgcgctgccccgaacttaatattctcggcaatgcgtttcgccgtttgcggcggcagttcaccgacaatggtgatttcggcgttatcacgtacgcttgtactgacggttctgcgtccggtgcgcaacatctgatcggtgctcgatggcgtagcgcggttaacgtttaccgagaagctgaataatccgtcggaatagagacgtgattcgataggcatgttgtccatcgtcggtagcggacgtcgactactggaaacttcgctaaaaccctgtggcaaccaggttggcgtccagctgaatttagctttttcacctacaggaacagaaagcaacggcggcaaatttgccttcgccagcgtctgcatactgctgctgatatcctgattgacgttaaaagcaatcacgcgaaattgttccagcgtttcaccatcgcgatcaaggagatcaacccgcatcggtaatttcgattcggtgtccatccacacgatgtagctgtagcgtgtaccatctcgggcaaccacgcgaatgacttcgcaaagacgatcagcaatacgcgtgcgcccgacggagataaagtcgtagtaaggagaaaggcgtttgaaatcggtatagataagcgatggcagagaatcaacaatgtaatcgccattaagcgtgaacggttcaagtcccggttcaaaatagctgatttcattgccgcgctgtaccacttcccggcgcgggccatccatttgcaacaattgtgcaagagggcggttatcgaggcgtgcatgtcgataacgcagagactcaacaccctgtttattgatgctgatgaatgacagctcgtaattcagtgactgactggccaggttcatctgctgtaataacgccccggacgcgggagtggccgaggcgttagcagagaataacaggctacctgtcactaatgacatggcaaaccaaagttgcttcattactgcgattgcgttcctaaagtttgaattcctggcacctgtacagcggcttgctgggtttgcgcctgctcaaactgaagctgttcagagtggagtcggcgttgcagttcgtaatcctgcaacattgcattaatgcgacgacgctgctcctgtacctgctgctgttgaccattgtttgcggtcgcttcagaaggtactcccaggcttaccgggctggctttacccatcatcggcagtgtattaaataccggcgtttcgggctgctgggacgtttcagattgtccattatagtgctggacgccaacgataactgcaagcgatacgcatgctgctacgcccatttgggtaagctgtgccgcccacggacgtactttctgccagaatggcattttctgccattgatgcggcgcaggctgggcttccgggatcaatgtcgccggttgacgtactggctcttcttcaatggcggccatcacgcgtgaagagatatcgaaatggagcacctcgggagtatcaccccgcattgagtcacggattaagtgatagctttcccaggttttctgcatttctgggttatgagccagttcgttaagcagctcactatccagcgtttcgccatccattaaagcggaaagttgttctttctgcatgcctaatacccttatccagtatcccgctatcgtcaacgcctgataagcggttgaactttgttatcaatagcttccctcgctcggaagatacgtgaacgcaccgtacctaccggacaatccatgatagcggctatctcttcatagctcaggccatccagctcccgcaaggttattgccatgcgcaaatcttccgggagggactcaatagttcggaaaactatctgtctcagttcttctgacaacattaagttctcagggttcgaaatttctttcaacgcgccgccactttcgaagttttcagcttcaatggcatccacatcactggaaggtggacgacgcccctgagcaaccaggtaatttttcgctgtatttacagcaatccgatacagccatgtataaaaagcgctatctccccggaacgaatccagcgcacgataggctttaataaaagcttcttgtaccacatcgggaacatcacccgacggcacatagcgggaaaccagactcgccactttatgctgatagcgcactaccagtaggttaaaggctttctgatctcccttctggacccgttcaaccaggacctggtccgttaactgctcgctcatccgaggtaaagtctccccaaaccaaatttccacgcgctatcgaaacgccactccattagctgcaatttgagcaagcaaagggttagagtgtctcgtttttgtaaagttccgtaacgcatctgtttttgtttgtcatgctgtagacggatcattatctatcattataagtctacagaatctgaacatcgcattatctgtgtagaaatgcccatttaactgcctgaagagtaacccaacggcctttttatttcaccacctaatcctccaccagccagtaacttctctttttctcgccgccctgcgtcagcgtgtttagccactgtaacaaatattaaaatagcaggtgtttattcgcacaacatgatgctatgctgaccaaacggtgtttagtaaattaaacaaagaaaatgaatactctcccagaacattcatgtgacgtgttgattatcggtagcggcgcagccggactttcactggcgctacgcctggctgaccagcatcaggtcatcgttctaagtaaaggcccggtaacggaaggttcaacattttatgcccagggcggtattgccgccgtgtttgatgaaactgacagcattgactcgcatgtggaagacacattgattgccggggctggtatttgcgatcgccatgcagttgaatttgtcgccagcaatgcacgatcctgtgtgcaatggttaattgaccagggggttttgtttgatacccacgttcaaccgaatggcgaagaaagctaccatctgacccgtgaaggtggacatagtcaccgtcgtattcttcatgccgccgacgccaccggtagagaagtacaatccacgctggtgagcaaggcgcagaaccatccgaatattcgtgtgctggagcgcagcaacgcggttgatctgattgtctctgacaaaattggcctgccgggcacgcgacgggttgttggcgcgtgggtatggaaccgaaataaagaaacggtggaaacctgccacgcaaaagcagtggtactggcaaccggcggtgcgtcgaaggtttatcagtacaccaccaatccggatatttcttctggcgatggcattgctatggcgtggcgcgcaggctgtcgggttgccaatctcgaatttaatcagttccaccctaccgcactgtatcacccacaggcacgcaatttcctgttaacggaagcactgcgcggcgaaggcgcttatctcaagcgcccggatggcacgcgttttatgcccgattttgatgagcgcggcgaactggccccgcgcgatattgtcgcccgcgccattgaccatgaaatgaaacgcctcggcgcagattgtatgttcctcgacatcagccataagcccgccgattttattcgccagcatttcccgatgatttatgaaaaattgctcgggctggggattgatctcacacaagaaccggtaccgattgtgcctgctgcacattatacctgcggtggtgtaatggttgatgatcatgggcgtacggacgtcgagggcttgtatgccattggcgaggtgagttataccggcttacacggcgctaaccgcatggcctcgaattcattgctggagtgtctggtctatggctggtcggcggcagaagatatcaccagacgtatgcctgatgcccacggcgtcagtacgttaccgccgtgggatgaaagccgcgttgagaaccctgacgaacgggtagtaattcagcataactggcacgagctacggctgtttatgtgggattacgttggcattgtgcgcacaacgaagcgcctggaacgcgccctgcggcggataaccatgctccaacaagaaatagacgaatattacgcccatttccgcgtctcaaataatttgctggagctgcgtaatctggtacaggttgccgagttgattgttcgctgtgcgatgatgcgcaaggagagccgtggactgcattttacgctggattacccggaactgctcacccattccggtccatcgatcctttctcccggcaatcattacataaacagataaaaagcctgggtcagcgctgtatacgcttcggaatagttctggtctggcccacgaatgactaagcgatcactaaagcattctcccgcctgcggggagaatgccagcagcacccgatgcggcagtcgcgcttcgttttccgccacatccgtccgcaaacgtaaatgccagcccatgcttaatgccagttcagtaaaaccattaccaatctgctctggcagcaccacgcagaaaaatccctcttcggtaatgcactccgccgcacaggtcagcagcgatgggtgatcaagcgtagtggtatagcgagcctgttcccgttgaggtgtcgcacactctactccctgctgatagtaaggtgggttactgatgattaaatcgaagcgcgcggtctgctgtgttacccactgctgaatatccgccgtatggacgttaatccgctctgcccacggggactggttgatattttcctgcgcctgcgcggcagcttcactttccagctcaacggcatcaattatcacgctgtcactggttcgctgcgccagcatcagtgccagcaacccgctacccgcgccgatatcaaggcaacgtttcaccccagccaccggtgcccatgcgcccagcaaaatgccatccgttcccactttcatcgcacagcgatcgtgagcaacaaaaaactgtttaaaagtaaatccattacgacgaagcacggatgtagactgtgacatgaaaataaaaccttgcaggaaaaacggcgatagcaccgggtgagaacaatacccgagaagcgatatccatacaaacagatgaagattgcagccgtaacgtctataatcagcgccccacacagaggtagaacatgactgtaacgactttttccgaacttgaactcgacgaaagcctgctggaagccctccaggataaaggtttcactcgcccgaccgccattcaggctgccgccattccgcctgcgctcgatggccgtgatgtactcggttctgcgccgacaggcaccggtaaaacggcggcgtatctgctgccagcgttgcagcacctgctcgatttcccacgtaagaaatccggtccaccgcgtattttgatcctcaccccaactcgcgagctggcgatgcaggtggccgatcatgcccgcgaactggcgaaacatacgcatctggatatcgccaccatcaccggcggcgtagcctatatgaaccacgcggaagtgttcagcgaaaatcaggacatcgtggtcgccacgaccggacgtctgctgcaatacataaaagaagagaacttcgattgccgcgcggttgaaacgctgatcctcgacgaagcagaccgtatgctggatatgggcttcgctcaggatatcgaacatattgctggcgaaacgcgctggcgtaaacagaccctgctcttttcggcaacgctggaaggcgatgcgattcaggactttgccgagcgtctgctggaagatccggtggaggtttctgccaatccgtccacccgtgagcgcaaaaaaattcatcagtggtattaccgcgccgatgacctggaacataaaaccgcattgctggtgcatctgttaaaacagccggaagcgacccgctcaattgtgtttgtgcgtaagcgtgaacgtgtgcatgagctggcaaactggctgcgcgaagcgggcatcaacaactgctatctcgaaggtgagatggtacaaggcaagcgtaacgaagcgatcaagcgtttgaccgaaggtcgcgtaaacgtactggttgcaaccgatgttgccgcgcgcggtatcgacattcctgacgtcagccacgtctttaacttcgatatgccgcgcagtggcgatacttatttgcaccgtatcggacgtaccgcgcgcgccggtcgtaaaggcaccgcaatttcgctggtggaagcccatgaccatttgctgctgggcaaggttggccgttacattgaagagccaattaaagctcgcgttattgatgagttacgcccgaaaacgcgtgcgccaagcgaaaagcagaccggcaagccatcgaagaaagtactggctaaacgtgccgagaagaaaaaagctaaagagaaagagaagccgcgggtgaaaaaacgccatcgcgacaccaaaaatattggtaagcgccgtaaaccaagcggaacgggcgtgccaccgcaaacgacagaagagtaatctcaatgccgggtttaagcctggtattaaaagtgctggcaaacgcaaaactgcctgatgcgctacgcttatcaggcctacgtggctcatgcaatatattgaatttgcacgatcttgtaggccggataaggcgttcacgccgcatccggcatgaataaagcgcactttgtcgacaagttaaatgccgggtttaatcccgacattatttttatccagccacaaaactctcttcaacacactgaataaaagtgtgcatcgccgggctaaccgcttttccagcatggtgtgcgcacatggccgtaatggtctgcgactgttcgccaaaaggcaattcaattaattctccgctctcaagctctttttccaccgcaaagcggggcaagtaactgacaccgatattcgccgcgacacaacgtttgatactttcaatgcttaacagctcaatggtgttttccaccgtgatccgccgctgacgcagcgtgctctcaaatatctgccggaagacacattgcggttcgttgataataaagctacaggcgttatgtcttcccggctcagtaaaatcgacatctgcaatttgcggtgaagccaccagcaccagcgattgttcacccaactctcgtcggttcagggcatcatcattccctacgcgataaaagacgccgacatcggcctcatcattcagtagcgcatcacggatcacgtaacagttcagcgactgcaacgataaacgcacttttggtgcgcgttgccgaaaacgctgcaacacctgcggcattcggtaagagagcaacgtttcgcccgaaacaacgcgtagttccccgtccggatctgactcctttttagcagcctcacgaagcgtatccatcactcgggtaagttcataaatgtgcggcagcaacttttttccttcgcgggtaaggcacatccgtcggccaattttctcaaataactggactgaaaactcctgctcaagctgctgaatatgaaaagtcaccgtcgattgtgtacagcacaatttttgcgaagctcgcaaaaaggaaccctcttccaccacggttttaagcgtaataaaacggcgcagatccataaccccaaacctatcgaaaatatcgaatctagaatataaaaacattcatttttttaaatgttccgtgtcgggtactgtctaccaaaacagaggagataacaagtgacaccgacccttttaagtgctttttggacttacaccctgattaccgctatgacgccaggaccgaacaatattctcgcccttagctctgctacgtcgcatggatttcgtcaaagtacccgcgtgctggcagggatgagtctgggatttttgattgtgatgttactgtgtgcgggcatttcattttcactggcagtgattgacccggcagcggtacaccttttgagttgggcgggggcggcatatattgtctggctggcgtggaaaatcgccaccagcccaacaaaggaagacggacttcaggcaaaaccaatcagcttttgggccagctttgctttgcagtttgtgaacgtcaaaatcattttgtacggtgttacggcactgtcgacgtttgttctgccgcaaacacaggcgctaagctgggtagttggcgtcagcgttttgctggcgatgattgggacgtttggcaatgtatgctgggcgctggcggggcatctgtttcagcaattgtttcgccagtatggtcgccagttaaatatcgtgcttgccctgttgctggtctattgcgcggtacgcattttctattaacgaaaaaaagcggaagaggtcgccctcttccgcttagtaacttgctacttaagccttacaggctttcagtaaaggtacgagcgataacgtcgcgctgctgttccggagtcagagagttaaagcgaactgcataaccggatacacggatggtcagctgcggatatttttccggatgcttaactgcatcttccagagtttcacgacgcagaacgttaacgttcaggtgttgaccaccttcaacgcgaacttctggtttcacttctactggaacttcacggtattcaatgtcacccagtttgcttactgcaaccacttcatcttctgcataacctgcttttgcaacgatgcaacgtgcttcgcctttttcgctgtccagcagccagaaagagttcagcagatcgtcgttagcggctttagtaatctggatacctgtaatcatgtgatgcctccccggcaaaattatttgatttgttcagcctgtcgcggccaattggtaaaaccattgttgcttgagtgtatatatactcctcaaccacccttgattctttgatttaaatcaataaaaaccacacatcgattgtggtcgtaaatggattttattgttttacatcaacttatgcgggtgtgaaattttaccaatttacatttttttgcactcgtttaagtctaaaaaatgagcatgattttgttctgtagaaagaagcagttaagctaggcggattgaagattcgcaggagagcgagatggctaacgaattaacctggcatgacgtgctggctgaagagaagcaacaaccttattttcttaatacccttcagaccgtcgccagcgagcggcagtccggcgtcactatctatccaccacaaaaagatgtctttaacgcgttccgctttaccgagttgggtgacgttaaagtggtgattctcggccaggatccttatcacggaccgggacaggcgcatggtctggcattttccgttcgtcccggcattgccattcctccgtcattattgaatatgtataaagagctggaaaatactattccgggcttcacccgccctaatcatggctatctcgaaagctgggcgcgtcagggcgttctgctgctcaatactgtgttgacggttcgcgcaggtcaggcgcattcccacgccagcctcggttgggagacgtttactgataaagtcatcagcctgattaaccagcaccgcgaaggcgtggtgtttttgttgtggggatcacatgcgcaaaagaaaggggcgattatagataagcaacgccatcatgtactgaaagcaccgcatccgtcgccgctttcggcgcatcgtggattctttggctgcaaccattttgtgctggcaaatcagtggctggaacaacgtggcgagacgccgattgactggatgccagtattaccggcagagagtgagtaaatttgcggtaaaatgccggatggcagagttgccacccggctgatttatcaggctttattctgacgccaccattcaccaagcaaaacgccggttgcaacagagatattcagcccggcaacgttgcccgtaccgtcaatcttcacgcgcagatcgttcggatcgcgtgcggcatccggtaacccttcatattcctgacccagcaccagtaccattttcgctggcagactggttttgaacagcggtttcccctgctcgctggaagtggtcactacggtgtaacctgcctgacggaaatcatccaacacgttaacaatgttgtcgccagtaatcggctgaacgtgctctgcgccgccttctgcggtacggatagccgcccccgactccagcagtgccgcatcctgcaccacaacgcctttcacgccgaagtgcgcgcagctgcgcatcatgccacccaggttatgcgggttagattcgttttccagcgccagtacacaatcctgcgcgcctgcctggcttacccactgctgcacggttgtgccattacgctttttgatcaggaagcaaacgccgccgtgatgttccgtgcctgacgcttttgtcaattccgcttcatccaccacatggtacgctttgcggtttgctgccatccagcgcaaggcttctttaaaacgcggcgttacactctggataaaccaggcgcgaacaatcgcttccggacggctctggaaaagtgcctgacatgcattttcgccgtagacgcgggtttcttccgcacgctgacgacgcaacacttccggatcaataaaacttttaccactgatgccaccgtgatcggccttttccggcgtctcatcacccggcgcgcgggaaaccgtgcgccacggcgaatcttcccacttgcggtcacggggctgactctgtttgtcatcgcgggcggggcgacggccaccgtcagcacgagattttcctggacgcccgccccctttcccggtacgcgggttgtgggtacgtttatcagaatcatcatcactgcggacatacatcactttgaccttgccgcttttacctttcatttcatcgttcatgcttttctccaccagcgctgcgcgaagcgcgcagattacccgaagtccgcgcggttcgccatgatttcgtaccaaagcctgcgactatcatacctattgaataaaacagattgttgtctggaacaatgtccccgataatatgtaacatattagaaacataccggcgtcgttgccgataagtctccttactcatcccgaggttagttatgaataccgtttgtacccattgtcaggccatcaatcgcattcccgacgatcggatcgaagatgcggcaaaatgcggacgctgcggtcacgacttgtttgacggagaggtgattaatgcgaccggtgaaacactcgacaaattgctgaaggatgatctacctgtggtgatcgacttctgggcaccgtggtgcggcccctgccgtaatttcgcaccaatttttgaagatgtcgcgcaagagcgtagcggtaaagtgcgctttgtgaaagtgaataccgaagctgaacgtgaattgagcagtcgctttggaattcgtagtataccgacgatcatgattttcaaaaacggtcaggttgtcgacatgcttaatggcgcagtaccgaaagcgccgttcgatagctggctgaacgaatctctttaatcttaccggggcgcatcttgtgccccgttttctcctctgcgacaatggcgttttttcgacgctctcttatgaccgaaaacgctgttctccagttacgcgccgagcgtattgcgcgcgcaacacgtccttttcttgcccgcggtaatcgcgttcgtcgctgccaacgctgtcttttgccagagaaattatgtctctgttcgacaattaccccagcacaagcaaaaagtcgcttctgtttgctgatgttcgacaccgagccaatgaagcccagtaataccgggcgtctgattgctgatattttgcctgataccgttgcgtttcaatggtcgcgtaccgaaccctcgcaagatttactggatctggtacaaaacccggactatcagccaatggtggtctttcccgcttcgtatgctgatgagcaacgggaagtgatcttcacaccacctgccggtaagccaccgctgtttatcatgctcgatggtacctggccggaagctcgcaagatgtttcgtaaaagtccgtatctggataatcttcccgtcatttccgtcgatctttcccggctttctgcctatcgcctgcgtgaagcccaggctgaaggccaatattgtactgccgaggtagccatcgcactgttagatatggccggcgataccggggcggcagcagggttaggcgagcattttacccgctttaaaacacgctatctggcaggaaaaacgcaacatctgggtagcatcacagcagaacagttagaaagcgtttaaaatcattcggtcacttctgcgggagaccggtatgagtcagcgaggactggaagcactactgcgaccaaaatcgatagcggtaattggcgcgtcgatgaaacccaatcgcgcaggttacctgatgatgcgtaacctgctggcgggaggctttaacggaccggtactcccggtgacgccagcctggaaagcggtgttgggtgtgttggcctggccggatattgccagcttgccctttacacccgaccttgcagttttatgtaccaatgccagccgtaatcttgctcttctggaagagctcggcgagaaaggctgtaaaacctgcattattctttccgccccggcatcgcaacacgaagatctccgcgcctgcgccctgcgccataacatgcgcctgcttggaccaaacagtctgggtttactggctccctggcaaggtctgaatgccagcttttcgcctgtgccgattaaacgcggcaagctggcgtttatttcacaatcggcagccgtctccaacaccatcctcgactgggcgcaacagcgtgagatgggcttttcctactttattgcgctcggcgacagcctggatatcgacgttgatgaattgctcgactatctggcgcgcgacagtaaaaccagcgccatcctgctctatctcgaacagttaagcgacgcgcgacgctttgtttcggcagcccgtagtgcctcgcgtaataaaccgattctggtgattaaaagcggacgtagcccggcggcacagcgactgctcaacacgacggcaggaatggacccggcatgggatgcggctattcagcgtgccggtttgttgcgggtacaggatacccacgaactgttttcggcggtggaaacccttagccatatgcgcccgctgcgtggcgaccggttgatgattatcagcaacggtgctgcgcctgccgcgctggcgctggatgccttatggtcacgcaatggcaagctggcaacgctaagcgaagaaacctgccagaaactgcgcgatgcactgccaggacatgtggcaatctctaacccgctcgatctgcgcgatgacgccagcagtgagcactatattaaaacgctggacattctgctccacagccaggattttgatgcgctgatggttattcattcgcccagcgccgctgctcccgcaacagaaagcgcgcaagtattaattgaagcggtaaagcatcatccccgcagcaagtatgtttctctgctgacgaactggtgtggcgaacattcctcgcaagaggcacgacgattattcagcgaagccgggctgccgacctaccgtaccccggaaggaaccatcactgcttttatgcatatggtggagtaccggcgtaatcagaagcaactacgcgaaacgccggcgttgcccagcaatctgacctccaataccgcagaagcgcatcttctgttgcaacaggcgattgccgaaggagcaacgtcactcgatacccatgaagttcagcctatcctgcaagcatatggcatgaacacgctccccacctggattgccagcgatagcaccgaagcggtgcatattgccgaacagattggttatccggtggcgctgaaattgcgttcgccggatattccacataaatcggaagttcagggcgtcatgctctacctgcgtacagccaatgaagtccagcaagcggcaaacgccattttcgatcgcgtaaaaatggcctggccgcaggcacgggtccacggcctgttggtgcaaagtatggctaaccgtgctggtgctcaggagttgcgggttgtggttgagcacgatccggttttcgggccgttgatcatgctgggcgaaggcggtgtggagtggcgtcctgaagatcaagccgtcgtcgcgttaccgccgctgaacatgaacctggcccgctatctggttattcaggggatcaaaagtaaaaagattcgtgcacgcagtgcgctacgcccattggatgttgcaggcttgagccagcttctggtgcaggtttccaacttgattgtcgattgcccggaaattcagcgtctggatattcatcctttgctggcttctggcagtgaatttaccgcgctggatgtcacgctggatatctcgccgtttgaaggcgataacgagagtcggctggcagtgcgcccttatccgcatcagctggaagaatgggtagaattgaaaaacggtgaacgctgcttgttccgcccgattttgccagaagatgagccacaacttcagcaattcatttcgcgagtcaccaaagaagatctttattaccgctactttagcgagatcaacgaatttacccatgaagatttagccaacatgacacagatcgactacgatcgggaaatggcgtttgtagcggtacgacgtattgatcaaacggaagagatcctcggcgtcacgcgtgcgatttccgatcctgataacatcgatgccgaatttgctgtgctggttcgctcggatctcaaagggttaggcttaggtcgacgcttaatggaaaagttgattacctatacgcgagatcacggactacaacgtctgaatggtattacgatgccaaacaatcgtggcatggtggcgctagcccgcaagctcgggtttaacgttgatatccagctcgaagaggggatcgttgggcttacgctaaatcttgcccaacgcgaggaatcatgagtaaggtactggaaatgttgaccacttaatcgggactggtgttattattgcccgcttatgtcgtctgcattgcacagaggacccttcaatgaacagagaagaaatgcactgtgatgttgtcaaaatttaagcgtaataaacatcaacaacaccttgcccaactacccaagatttctcaatcagttgatgatgtcgatttcttttacgctcccgccgacttccgggagacgnnnnnnnnnnggaaaaaatagccagcgcgaagcagcgcatttgcattgtcgccctgtatctcgaacaggatgacggtggcaaaggcattctgaacgcgttgtatgaagctaaaaggcagcgtccggaactggatgtgcgggtgctggtcgactggcatcgtgcacaacgtggacgcattggcgctgcggcatctaacactaacgctgactggtactgccgcatggcgcaggaaaatccgggcgtagatgttccggtttatggcgttccaatcaatacccgtgaagcccttggtgttctgcactttaaaggctttatcatcgacgatagcgtactttatagcggtgccagcctgaacgatgtttacctgcatcagcacgataaatatcgctacgaccgttatcatcttatccgtaaccgtaagatgtcagacattatgtttgaatgggttacacagaatattatgaatggccgcggcgttaatcgtctggatgatgttaatcggccaaaaagcccggaaatcaagaacgatattcgtctgttccgccaggagctgcgtgatgccgcttatcatttccagggcgatgccgacaacgatcagctttccgtaacgccgctagtggggctggggaaatcgagtctgttgaacaagaccattttccatcttatgccttgtgccgagcagaaactaaccatctgtacgccatacttcaacctgccagcaatccttgtgcgcaatattatccagttgctgcgcgaagggaaaaaggtcgaaattattgttggtgataaaaccgcgaacgacttctacattccggaagatgaacctttcaagataattggcgcattgccttatctctatgagatcaatctgcgtcgtttcctgagccgtttgcagtattacgtcaatactgaccagctagtggttcggttatggaaagatgacgacaacacctatcacctaaaagggatgtgggttgatgataagtggatgttgatcaccggtaataacctgaacccgcgcgcctggcgtctggatctggaaaacgccattttgatccacgatccacaactggagcttgcgccgcagcgagagaaagaactggagctgatccgcgagcataccaccatcgttaagcactatcgcgatctgcaaagtattgccgattatccggtgaaggttcgtaaactcatccgccgtttgcgccgtatccgcatcgaccgattaattagccgcatcctgtaatcacaaccccgtcctgtacggggtttgttttttggaggccacgttttgcgtattctttttgtctgttcgctattgttactttctggatgcagccatatggctaacgatagctggagcgggcaggataaagctcaacactttatcgcctcggcgatgctttccgccgccggaaatgaatattcacagcatcaggggatgagccgggatcgcagtgccatgtttggattgatgttctctgtcagtttgggggcgtcaaaagagctttgggatagccgccccgaagggagcggctggagctggaaggatttggcctgggatgtcgccggtgcaagcaccggctataccgtctggcaactgacccgtcactaaagacgcatccccttccctttgcgatgtagcatcaaagaaaccagaaacgccaccacggccatcaaggtcacataccagaagaaggctgtttccattcctattgatttcagcgacaacgctacgtactccgccgaaccaccaaatatagcattagcgaccgcatatgacaggccaacgcctaatgcgcgaacctgtgccgggaacatctcagccttcagtattccactgattgatgtataaaaactcactatcagcagggcacacatcaccagaccaaaagcggcataaggcgaggaaacgttttgcaatgctgagagaataggaacggtaaaaatggctgccagcgaaccgaaacataacatagaggtacggagaccaatcttatccgacagcgcgccaatgagtggttgaataagcatgaatacaaacaatgcggcagtcataatgccactcgccacgttggcatgcattcccgcagtatttaccagatacttctgcatataagtggtgaaggtatagaaacaaagggagcccgcagcggtaaaaccgagaaccatgatgaatgcacggcgattgcgccataatcctttcagagatccagcttcttttaaagcgcgcgtttcttgttgcgaagtttcatctaattgacgacgtaaccacaacgccacaacagctaacacagctcctaacgcgaaaggaatacgccatccccactctctgagtgcagcgtcttccatggtgtgttgtaaaaccacgacaaccagtagggctagcagttgtccgccgatcaacgtcacatactgaaatgatgcgtaaaaacctttgcgcccttcaacggcaacttcactcatataggtggcgctggtgccatattctccgccaacggataatccctgaaataaacgagcgagaagcaataatgccggagcccacgtacctatagtttcataacctgggaggcaggcgataaccagcgatccgaaacacatcatacacaccgataacagcatcgattttttgcgaccatgtttatcggctatgcggccaaatagccaaccgcctattgggcgcatcaggaatcccgcagcaaaaacacctgctgtttgtagtagttgagtcgtcgtgttcccggaagggaagaaaatgtgggcgaagtagagtgaacagaacgagtagacatagaaatcgaaccactcgaccagattacctgaagaggcccccacaatcgcccaaatgcggcgacgagtatcactacttgtcagtttgctgtctgccgttacagtactttcagccatgccattatgtctcctgccgtaatccgatgcttttgtcggtcgcttttatttatttcttttggtaaagaaaatgttatacatttgttgcgtatcattatgcaaccttaaccatgaatttagttagcaggaaaatggttattgaggagcttaaggataaatttctggtaaggaggacacgtatggaagtaggcaagttggggaaaccgcatccgttgctgaatctggcatatgtgggagtataagacgcgcagcgtcgcatcaggcatttttttctgcgccaatgcaaaaaggccatcctgacggatggcctttcgcttaatttgatgcctggcagttccctactctcgcatggggagaccccacactaccatcggcgctacggcgtttcacttctgagttcggcatggggtcagg

SEQ ID NO: 212 - DNA, 27258 bp, Escherichia coli
  source 1..27258: mol_type = genomic DNA
tcatcggtgactaccgtcgcgttgcgctgtacggtatcgactacctgatgaaagacaaatacgctcagttcacctctctgcagactgatctggaaaacggcgtaaacctggaacagactatccgtctgcgcgaagaaatcgctgaacagcaccgcgctctgggtcagatgaaagaaatggctgcgaaatacggctacgacatctctggtccggctaccaacgctcaggaagctatccagtggacttacttcggctacctggctgctgttaagtctcagaacggtgctgcaatgtccttcggtcgtacctccaccttcctggatgtgtacatcgaacgtgacctgaaagctggcaagatcaccgaacaagaagcgcaggaaatggttgaccacctggtcatgaaactgcgtatggttcgcttcctgcgtactccggaatacgatgaactgttctctggcgacccgatctgggcaaccgaatctatcggtggtatgggcctcgacggtcgtaccctggttaccaaaaacagcttccgtttcctgaacaccctgtacaccatgggtccgtctccggaaccgaacatgaccattctgtggtctgaaaaactgccgctgaacttcaagaaattcgccgctaaagtgtccatcgacacctcttctctgcagtatgagaacgatgacctgatgcgtccggacttcaacaacgatgactatgctatcgcttgctgcgtaagcccgatgatcgttggtaaacaaatgcagttcttcggtgcgcgtgcaaacctggcgaaaaccatgctgtacgcaatcaacggcggcgttgacgaaaaactgaaaatgcaggttggtccgaagtctgaaccgatcaaaggcgatctcctgaactacgatgaagtgatggagcgcatggatcacttcatggactggctggctaaacagtacatcactgcactgaacatcatccactacatgcacgacaagtacagctacgaagcctctctgatggcgctgcacgaccgtgacgttatccgcaccatggcgtgtggtatcgctggtctgtccgttgctgctgactccctgtctgcaatcaaatatgcgaaagttaaaccgattcgtgacgaagacggtctggctatcgacttcgaaatcgaaggcgaatacccgcagtttggtaacaatgatccgcgtgtagatgacctggctgttgacctggtagaacgtttcatgaagaaaattcagaaactgcacacctaccgtgacgctatcccgactcagtctgttctgaccatcacttctaacgttgtgtatggtaagaaaactggtaacaccccagacggtcgtcgtgctggcgcgccgttcggaccgggtgctaacccgatgcacggtcgtgaccagaaaggtgctgtagcgtctctgacttccgttgctaaactgccgtttgcttacgctaaagatggtatctcctacaccttctctatcgttccgaacgcactgggtaaagacgacgaagttcgtaagaccaacctggcaggtctgatggatggttacttccaccacgaagcatccatcgaaggtggtcagcacctgaacgttaacgtgatgaaccgtgaaatgctgctcgacgcgatggaaaacccggaaaaatatccgcagctgaccatccgtgtatctggctacgcagtacgtttcaactcgctgactaaagaacagcagcaggacgttattactcgtaccttcactcaatctatgtaattagatttgactgaaatcgtacagtaaaaagcgtacaataaaggctccacgaaagtggggccttttttagcacgagagccttttttgtcagctatctatactttaaggtgactgccaaaacagactcgacgtagccttcgagctgcgcaccaacacggcctcagatgggccacatctggagaaacaccgcaatgtcagttattggtcgcattcactcctttgaatcctgtggaaccgtagacggcccaggtattcgctttatcacctttttccagggctgcctgatgcgctgcctgtattgtcataaccgcgacacctgggacacgcatggcggtaaagaagttaccgttgaagatttgatgaaggaagtggtgacctatcgccactttatgaacgcttccggcggcggcgttaccgcatccggcggtgaagcaatcctgcaagctgagtttgttcgtgactggttccgcgcctgcaaaaaagaaggcattcatacctgtctggacaccaacggttttgttcgtcgttacgatccggtgattgatgaactgctggaagtaaccgacctggtaatgctcgatctcaaacagatgaacgacgagatccaccaaaatctggttggagtttccaaccaccgcacgctggagttcgctaaatatctggcgaacaaaaatgtgaaggtgtggatccgctacgttgttgtcccaggctggtctgacgatgacgattcagcgcatcgcctcggtgaatttacccgtgatatgggcaacgttgagaaaatcgagcttctcccctaccacgagctgggcaaacacaaatgggtggcaatgggtgaagagtacaaactcgacggtgttaaaccaccgaagaaagagaccatggaacgcgtgaaaggcattcttgagcagtacggtcataaggtaatgttctaatttccccgtaaagcggcaactttattgagttgccgcttttttattccgcgcttcattctgctacagcgtttttaacacatcttatagtgcatctaccatatcccgtacctgagataataacgactgataatagctcgcgtgaagttcttccccatcgaataccactgtattacacaagaaagtgacatcggcatcttcaataccaagataactgcacatattttttaaataatcgcttatatttttttcccagcccatctggacaaatgattctttgtctcctccaaccagcgccacccaacgaactttattgaatggtaatttgtgcccatctccataagccagcccattattccatactctgtcaatatatccttttagcattgccgggaagctgtaccaccagagaggaaaaaccaccactaacgtgtcatgttcaagcagctctgaataaagctgatgaacctctggagaataacgtttatccatattcttccagtctggttcatcttccggcgtcatcactgggttgaaattacgccgatataaatcgagttccgtcacctgtattttccgctccattgcccgctgatggatcgcatcagcaatatgtgcggtcaatgaatcatgacgaggatgggcccataccaaataaatacgttcagactgcataattttacctccacgttaagttctggagcgcactttacgcaggcggcataatcctgtaaacgtgatgattcaggatgagttaatgaaggattttcactaatgcggatgaatatgtctgactttgccactttctttgccgtggcccgtaatcaaagctttcgtgcagcgggcgatgagttaggcttatcctcgtccgccattagccatagtattaaaacactggaacaacgtcttaaaattcgcttattcaatcggacaacccgaagcgtatcgttaacggaagcgggttctaatctctatgaacgattgcgcccagctttcgacgaaattcagatcatgttagatgagatgaatgattttcgtctgacaccgacaggaacgctcaaaatcaatgccgcccgggtagctgcacgtatatttttaatgcctttactggttggtttcacacgtgaatatcctgatattaaagtcgagctcacaactgacgactctcttgtcgatatcgtccaacagggctttgacgctggcgttcgacttagtggcatcgtcgaaaaagatatgatcagcgtggcgatcggcccgccagtgaaattatgtgtagcagcaacgccagagtactttgcaagatatggcaaaccccgccatcctcatgatctgcttaatcatcaatgtgttgtttttcgttatcccagcggcaaacctttccactggcaatttgcaaaggagctggaaattgctgtcgcaggaaatatcattctggatgatgttgatgctgaactggaggccgttttgatgggtgctggtatcgggtatctgctctatgaacagatcaaggagtaccttgatactggtcgtttagaatgtgtactggaagactggagcacagagcgtccaggcttccagatctattatccaaaccgccagtatatgtcctgcggcttgcgcgcatttctcgattatgtaaaaacgggtcagatctgccagagtcagcgtcaccgaccacaataattatttactattcgctttacgcgccagcagcgggaaaatcagtcctaatcctaccagcacaaacggcgttgcaacattcagcgccaactggaaggtccactctgcagtgaaggcttccattttcgggaagatccccgtcaaacaggcaaaggcggtaaaggcaaaacaccaaatcccgacggtcattgccagaggcttattacgaataaagacatattctggtttatatttctgcgccaggcgaacgactgcaataaatgcaacaaatacccataaataacgcagcggcatcactaccgaattaaggttcaacagccatttatagagattgttcatatcaccaatgccgagagtcggcagcataatcagaatcgccaccagtaccagggtcagaaaatagccattaacgggcgtaccagaagcgttggtacgacataaactggctggaatatatttgctgtcagcatcacctaatagcactttaagcggggcatcaatcgagaataccagcgccgctacttgtcccagggtattcgcaatggcgtaaatcaccattaaagtattacccatgttgtaatactcgcccagcttctgaaaggcgtaatactgaccgttggtcattaagtcatccgggatattacgcgaatcaaacatcatccccatcgccagcgagcccagaatggcacaaaccgcaaccatcaccgccaggcataacatcccttttggaaattcttttcctgggttgcgcgtttgattaacgtaaggagaaatcttctctgctccgccaaccgcgaaaaccagcattgaaatagtggtaatgtaggtaaagtcgatatgaggaatgaacgtttcccaggtaatgtttgtggtcgcaatatgcacttcagtaattgcaggcgcggttaccgccatcgccacatacaggagcgacataacaaacatcgcaatccctgccacagaaccgacgattttcagcgatttcataccgcgtgaagcaacccacataaagaagataaacagcaccagcgttaacccctgtaacgctacgactgaatattctttgattaacgaaccgtcgcctttcatcgcccaaccgagcgcaatcagtattgcctggggtttttgtgccagatagggaatatgcactacccagtaggtccacgcggcgaggtaagccagtccgggtcccatcgtgtgtttaatccaggtactgaccccgcccctcccatctttgaaggtcgagcctaactgaccaacaattagcgcataaggtgtgaaatagagcgcaaagataaacacccatgaaaaaacaaccaccagcccctggttggcgtagttattaacaacgttgccaaaaccccagacagtgataaaagacatcagcgcaatgttgtaccatcgcagctgtttttcctgaacattcccagccatagacaaatccttcgccaaaattaaaggggcatctgtaaaacgagggattatgcgcggcaaataagaagtgcggaaatagcgaaatgcaaaattataacctgctgcacattttatttttaaacgaataaaatttggaataaagcaagtcagatagaagaaacaaaaaagcagagtgtgaaacagtaagttcacactctgcttgaattcatttacacgtgagcaacgggtttcggcgtatgaccggcgttgcgcagcagcatcagcaaatagataaacgatacgctggcgatcatgataaacaataaattatcggagaaattctgcattagcatagcggtaaatgacgggccaagcagacttcccacagtatagctcaacagtaaggcctggttcatcgccaccagttgatgatgttcaactttctcgcaagcccatgccatcgccaccggatatagcgtaaagccagcggcaccgaggatgaataacgctggggccatcgccgcctggctaagcatcgcgatactgccgagaatgacgacaaagacctgaacacgcaacaccagcagtcgaccaaacttatccgccagacgtccaatcggccattgtccaaggatacccgcactgaccagtaccgccatccagaaaccaatgctggcattgctcacccctttgtgattgaggtacagcggcatcaggccatatagagatcccagaacgattcctgagataatgcagccattcacgccaagccgcgcctgacggagttttagcattgacgtaattgacgtcgaatcatggttttcagcctgctgattcagcacacgcgtaaacaacagcggtaagatccctgccaacgtcaaacctgtaacccacggcaatacggacatcagctcggttgaaactttgctgaccagtaactggcctaaaaacgttcccacgtaataaaccatcatatacgcagcaagcaaacgcccacggttacgtgacgtcccactgcacatcagcgcgctctcaacaaccacccaaatcatggcacagccgacgcccgcgacaaaacgccaagccaaccagctccagaatccaatcatcaggccaaggccggcacagccagcggcaaaaatgaaggaggccagataatagctgcggttaaagccaatgcgcttaatgacataccctgtcagcaatgtaccgacaaggttgccggtaaaataggatgagctgacaacgcctacctgccatgtggacatgtgttcctgggcgagccaaagcggcacgagtgtatttaacaccgcaatcgccagagtcaacaaaagcaggccagacagcaaaagcatgacaggccgggtatacgtggacatgaattaaaaccgtgaggaagttcaaatttcatgcgcatcatgccaccgccaaaaacattgtcaatgggtgaaaatacgcgatatcccagcggcggtattatcgatttatattactcattcataacgctaatgctgaagagatgattagtctcatctgattgtttttattgaactaacacaaatttcatacgcttcgttcagtcgaaaaatttcatggtcacagcaaactcatatttcccgtctatgctttcagagcaatgcatcgcgtctgatcgatttcagacgtaccactgactctcgaaaggagaagaggatgaccaaaccgtatgttcgtcttgataaaaatgatgctgccgttttgcttgttgatcaccaggctggtttactttcccttgtacgggatatcgaacctgataagtttaaaaataacgtgctggcgctgggtgacctggctaagtatttcaacttaccaactattcttaccaccagttttgaaaccggtcctaacggcccattagttccagaactgaaagcacaattccccgatacaccttacattgctcgcccgggaaatattaacgcctgggataacgaagattttgtaaaagctgtcaaagcgacaggtaaaaaacagttaattattgccggtgtggtaaccgaagtttgcgtggcattcccggcgctttcagccattgaagaagggtttgacgtctttgtcgtgactgacgcgtcagggacctttaatgaaattacccggcattcggcatgggatcgcatgtcgcaagctggtgcgcaattgatgacatggttcggcgtggcgtgcgagctgcatcgcgactggcgtaatgatattgaaggactggcgacgttgttctctaaccacattcctgattatcgtaatttgatgaccagttatgacacgttaacgaagcagaaataaaagagaaccggggccgaaaccccggttgttactgattagcttgcgacggccatccccacggtcatatgcaaaccatagaatacgccgcgaccgattaattcccctgccagaagcagaatgaatgagacggatagtagcggaaccgcaggctgataaccttttagctgtggtgcaatccacaagcacagggcaacggccaaaagcacgatccgccaggacatcagcgcaccatagtccggcaccagcgctgcggcctgctgcacagaactatgaatagtcgccagctctgcgccctgcatcactgacaccacgccactcactaccagtgccagtacagaaattgctggcagcagacgcatcgcccagccatcgacgccagccagactcaacaacaggtaacccagtaacgggccgcccataaacatcgtcaggaagaagcccatcggcgtccagatgctgtaccaggtcggaacggtatcaatgctgttatacacacgcaccatcatccagacaaagatgacgccaagaaccatcgtcactatcagccacagcgtacgcaatgccggtgacagctttttcagcattgccagcaaccagccgatgccgcctacggcaaaaaagatcgaaccgctggcgatttcgttactgagtgctgaagcccctacccggttgagcgagttaaaagcgcgcattggtgaaccaagatggagcatagaggcgataaagccaatgcccatcagcacccataaaccaaacatgcaggcgataacacgctgctgggcttctgctcgcaggtcgcctttgagcagcgccaaagccagaacgataaaaccacctgctacacattgcccgaagaccgtgaagatcatcagcggccattcatgccatccacttcccatctcacacctccttcgggtttgccagatagccagtggtatccccggtcgggcggctattggcattgggtttgatcacaatattcggtttggtaaagtgagctcgcggcaacggcgcaacggccgccagatcgccatgttttttacgcagctcgtcgatagggccgaaatccagcgcccgcagcggacaagattcaacacagatcggctttttaccctccgcaacacggtcataacaaccatcgcatttggtcatatggcctttcgtttcgttatattgcggtgcgccatacgggcaagccatatggcagtagcggcagccaatgcacacatcttcatcgaccacaacaaaaccatcttcgcgtttatgcatcgcaccgctcgggcagactttagtacaagccggatcttcgcagtggttacatgaaatcgacagatagtaggcaaacacgttctggtgccagacaccgttatcttcctgccagtcgccgccagcatattcataaatgcggcggaagctgacttctggcgtcaaatctttgtagtctttacaggccagctcgcaggttttgcaaccggtgcaacggctggaatcaataaaaaatccatactgggttgtcatcggttactccttacaccttttcaacctgaacaaggtttgtatgtgacggattccccttagcgagaggagacggacgttgagtggtcagtacgttaatacaaccgcccttatcgacacgttttgcatccgggtcataccaggcaccttcacccagtgcgaccacacccggcatcattcgtggcgtcactttcgcctcaatatgaacttcaccacgatcgttaaagatcctgactttatcgccgttgttgataccgcgtttttgcgcatcaagcgggttgatccacatttcctgacggcaagccgctttcagcacatcaacgttgccgtaagttgagtgaacgcgagatttatagtggaaacccgtaagctgcagcggatactgtttgttcagcggatcctgataactttcaaagcccggcgtgtagatcggcagtggatcgatcacatcgccttctggcaattcccaggtagcggcaatgtcagccagcgcctgcgaataaatctcaattttgcccgatggcgtagtcagtgggtttgcctgcggatcttcacggaaggctttataagcaacgtgatgcccttgtgggtcgcgctttttaaagatcccctgcttgcggaactcttcaaacgttggcagttcaggaatcgcttcccgcgactgggcatacagatgccgcatccactcttcctgtgtacggccttcagtaaactgttgctcaacgccaagacgttttgccagttcgctggtcatttcatagatggttttacattcaaagcgcggtttaatcacctgatcgttgaaaatcacgtaagacatattcccgcaggatgcatccagtgcaaagtccatctgttcggaagcggtgcagtcaggcagcaggatgtcagcatatttcgccgatgaggtcatgtggcagtcgataaccacaatcagctcgcacttcttatcatcctgaaggatttcatgggtacggttgatttcagaatgctggttaatcaggcaattaccggcatagttccagatcattttgatcggcacatccagcttatctttcccgcgcacaccatcacgtagcgccgtcatttccgggccacgttcaatggcatcggtccacataaacatagaaatgctggtctggatcgggttttcgagggtcggcatacggacaaacggcaggctataggaaccttcacgcgcgccggtgttaccgccgttaatgccgacgttaccggtcagaatcgccagcatcgagatagcgcgagtcgcgatttcgccgttggcgtggcgctgtggcccccatccctggctgataaacgccggtttggtactgccgatttcccgtgccagttgaatgattttctctgccgggataccggtgatttgcgaggcccattgcggtgttttagccacgccatctggcccttcacccagaatataagctttatagtggccatttttcggcgcgctagcgggcagggttttctcatcgtagccaacgcaatatttatcaaggaatgcctgatccaccaggttttcggtgatcatgacatacgccagaccgttaaccagtgcggcatctgttcctggacgaatagggatccactcatcttcgcgcccggcaccggtgtcggtatagcgcggatcgatgatgatcatgcgggcattagatttctggcgtgcctgttcaagatagtaagtcaccccaccgccactcattcgcgtttcgcctgggttattaccaaacagcactaccaatttactgttttcgatatccgacgggctgttaccatctgcccagccgccgtaggtatagttcaaaccttccgcaatttgcgcagaagagtagtcaccgtaatggttaagataaccgccgcagcagttcatcaggcgcgcgaccagggtatttcccggcggccaggagcgggtcatggtgccgcccagcgtaccggtgccatagttcagatagatagactcgttgccgtactctttgatcaggcgctgcatattggtcgcgatgatgtcgtaggcttcttcccagctaatgcgctcgaatttgccttcaccgcgcgccccgactcgtttcatcggatatttcaggcggtccggattgtagacacggcgacgcatggaacgcccacgcagacaggcgcgaacctggtgcaggccgtcgtaattgtcatcgccggtattgtccgtttcgacatatttgatttcaccgtccacgacgtgcatacgtagcgggcagcgactaccacagttaactgtacaggcgctccagataaccttttcgtctgattttgttggaatggcgctatcgacagcgtgcgcaatccgactaaaaggtaatgttaatgcgctgctggccattgccaggccgccgatcgctgtcgtttttaccaaaccacggcgactcacctcagcagccaataccgcatcagggattttcgttttcataatggctcactcaagcttgctcacgattgattccagtaacaaaccgtattgtgtaattatttctatagcagttcgctatataggcttgtatacatcgaataatttgaaaatcaaagagataggtagattttcactcgaaagtagtattacgtgtaagtgaggagtaattattgttcggtatcaaagggagacaaaaaaagcgcccgcaggcgctttttagattcagaaaaattgggtattagccaatatattccagtccgttcatatacggacgcagaacttctggtacttcaatacgaccatcagcctgctgatagttttccataaccgcaaccagcgtacgaccaacagccagaccagaaccgttcagggtatgaaccagacgggttttcttgtccgacttgctgcgacaacgtgcctgcatacgacgtgcctggaaatcccaaacgttggagcaggaagagatctcacggtaggtgttctgtgccgggatccatacttccaggtcgtaagttttgcaagcgccaaagcccatgtcgccagtgcaaaggatgattttacggtacggcaggcccagcaactgcaggactttttctgcatgaccagtcatctcttccagcgccgccattgagtcttccgggcgcacgatctgcaccatttcaactttgtcgaactggtgcatacggatcagaccacgggtgtcacgaccatatgaaccggcttcagaacggaagcatggggtgtgggcggtcatcttaattggcagatcatcttcatcgatgatttcaccgcgcaccaggttagtcagcggaacttctgccgttgggatcagcgcatagttactggtgtctgcttcttcttccagcggacgagtatggaacagatcgccagcaaatttcggcagctgacccgtaccgtacagcgtgtcctggttaaccaggtacggaacatagttctcactgtagccatgctgttcggtatgcagatccagcataaactgcgacagtgcgcggtgcatgcgagcaatctgccctttcattaccacaaagcgggaaccggtcagcttaactgcggctgcaaagtcgaggccagagtgcatttcacccagcgtcacatggtcacgaacttcaaagtcaaactcacgcggggtgccccagcggctgacttcgacgttgtcattttcgtctttacctaccggcacttcatctgcaggcaggttagggatggtcagcgcgatatcgcgaatttcagcctgtaaagcatccagctcggcttttgctgcatccagctcttcgcccagtttgttcacttccagacgtaaaggctcgatatcttccccgcgcgctttcgcctggccaatggatttcgatcgggagttacgctccgcttgcaggttttccgttttgacctgcaatactttacgacggtcttcaagagcgcccagcttatctacatccagcttaaagccccggcgtgccagtttttcagcgactgcgtctggctcattacgcagcagattgggatcgagcatgcttatcctgtgcttatcgaattaaatgggagatgtggccacagcctgcgaccacagggatacagtaacaacattaccgcaacgataacattaacggtagcgttttatggggctattttgatcctgttcagccagccaggcgagcttttcgccaatcttgccttcaaggcccctgtttgtcgggaaataatagcgtgtttgtgctatttccggcgggaagtaaacctcaccggcagcataagcgtttgcttcatcatgagcgtaacgatattcctgcccgtagcccatttccttcattaatttcgtcggcgcattacgcaaatgaaccggcacgtcataatccggacgttcgcgagcatccgccagcgcggctttaaacgcagtgtagacagcgttgctttttggcgcgcaggctaggtaaacaatcgcctgagcaatggcgcgttcaccttccgccgggccaacgcgagtaaagcaatcccaggccgcaattgccacctgcatcgcccgtgggtcggcattgccgacatcttcggaagcaattgccaggcaacgacgcgcgacatataacggatcgccaccggcggtaataattcgcgcataccagtagagcgccgcatcgggtgcgctaccacgtaccgacttatgcagtgcggaaatcagatcgtaaaagcgatcgcctttgttatcaaagcgggcgctacgttcacctgcgatttcggtcagtaattcaggcttcaggacccgcttaccgctatcatcgacttcggccatatccgccatcatttccagcgtatttaacgcccggcgcgcgtcgccattcaccagttcagcaatggcgcgtcgtgtttcatctggcagaacaatatcctgaccaccatagccacgggttttgtcttccatcgcctgagttagtacttgctcaatatcctctgtactcagggatttcaatagatagacacgggcacgggaaagcagtgccgaattaagctcaaacgacgggttttcagtggttgcgccaataaaagtgatggtgccgtcttcaatatgtggcagaaatgcatcctgctggcttttgttgaaacggtgaacttcatcaacaaaaagaatagtgcggcgacctgcattgcgattttgccgggcgcgctcgatcgcctcgcgaatttctttcacgccagaggtgacggcagaaatacgttccacatcagcgttcgcatagcgggcaatcacttcagcgagggttgttttgccggtacccggtggcccccagaggatcatagaatgtaaatgcccggcttcgatagcgcgcggcaacggcttccccgcagccagcaaatgttgctggccgatatactgtgctaaattttctggccgcatacgcgcggccagaggttgaaaagtattatccgaaaaatcgagcgacagattgctcactcaggtgcctctacttacgttgatcatctaccgtgacgccttgcggcggggtgaaggtaaatttcgctgcatccacagccccattttgctgggatttcagttgataactgctgcgctgatcgtcctgctccaccgcgctaaactgatggattgtgccatcacgtcccacgttaatggtgaactgcttcagattgccattgctggctttcggcgtcaggacaaagtcatcgccattctgtttgatattgtactgctgccagtcgctggactggttgcgggcaatcagcataaacggcgtattaccggtggcatctttcagccaggttgccgtagcttgctcaacgaacgggttatagaaccacagtgttttaccgtcagaaaccagaatgctttcatcaggttgtgtcatatgccagttgaataagtttggacgtttcacccacagatcgccctgaccttcctgcaccgccgcgccgctaccgtcagtcactttttgtgtgaagctggcgtggaagctgctgactttatccaggcggcttttcagatcgcttgcggcatcagcccaaacgctgcttgctactaagcttgagagtaatgcacaggtgatggcaatttttttcatcattattcctcaaattacgtcactcccgatcgggagttccctctactctctattccaggctaataatcagcttgaggaaagaagaaaatactgaattttcagttgatagagtgccggatgcgacgctaccgcgccttatccggcaatgcattaattagtcaaacggcggtggggccagcacttcacgattaccgttgtgcccctgttcgctgacaatcccctgcgcttccatctgttcgataatacgcgctgcacggttataaccaatgcggaactgacgctgtacgccagaaattgacgctttgcgtttttcagtgacaaactgcaccgcctgatcgaacaacggatccagttcttcagcgccatcgaaaccgcccgcgccaccttcgctttcactgtcggaagtgatgccatcaacatactgtgggcgaccacgcgctttccagtcctgcaccacggcatgaacttcctgatcgcgaacaaaagcaccatggacacgtaccggcaacgtggagttcggcccagagtagagcatatcccccatccccagcagtgattccgcgccagcctgatcaagaatggtacgtgagtcaatcttactggatacggtaaaggcgatacgggtcggaatattcgctttaatcagaccagtaataacatcaaccgatggacgctgagttgccagtacgaggtggatacccgcggcacgggctttttgcgccagacgtgctatcagctcttccacttttttacctaccgtcatcatcaggtcggcaaattcgtcaaccaacaccacaatgtatggttcttttttcagcaccggatgctgggcatccatactgtcacccggcttccagtacgggtctggaatcggacgcatcatgcgatcggcttcagcaattttttcgttataacccgccagattacgcacacccagcgcagacatcagtttataacgacgctccatctcgttaacacaccagcgcagcgcgttggcggcatctttcatatcagtaacgacttccgttaacagatgcggaatgccttcataaaccgaaagctccagcattttcgggtcgatcatgatgaaacgcacatcttctggctgtgctttataaagcatgctcaggatcatcgcgttcacaccgacagatttaccggaaccggtagtccccgcaaccaacaagtgcggcattttcgccagatcggcaaccaccggctcaccggcgatatctttacccagcaccacggttaatggcgacggattatcgcggaatttggcgttatccaaaacttcgcgcagataaacggtttgtcgttttttatttggtaactccagacctacatagggtttgccaggaataacttcaacgacacgcaccgccaccgtcgaaagtgaacgggcaaggtcccgtgacaagttagaaatgcgcgccgcttttacgccaggagccaggttaagttcaaagcgagtgataaccggccccggagagtaattgacgacatcggctttaatacggaaatcagccagacgcgcttccaccaggcgagccatttgttcaagcgcaaaggtatctaccggctccacttcgctcggcggcggtgtcagcaaatccagagaaggcagcggcgtcgtcggtttatgcaacggacggctgtcgccattacgcatcaacagcggatgaagcagggtatcctgctgctgcggtgcaaccggttgttgcggctgttgatactgcggctgcggcgcaactggttgttgcggctgctgatattgcggctgtggcgcaaccggttgttgcggctgctgatattgtggctgcggcgcaacctgctgttgtggctgctgatactgcggctgcggcgcaaccggctgttgcggctgctgatattgctgctgtggcggaactggttgttgcggctgctgatactgctgctgcggtgcaaccggttgttgcggctgctgtacaggttcaacaattggcgtaaacaacggttcgtgtggaccatcatccagcaacgctttcattggcgaaaattcaaaatcatccagcgagaacggattcgccccagccggttgttcgccggaataacgttgttgttgagtttgcgcaaactgacgagccagttcagcctctgccgcagcatctgcatcttctgcgtttacgggcacatcatgttgatactgttcgccatagcgttgctgctgtgtctgggcgaactgacgtgccagttcatcctgctgcatcgcatcgatttcatcatcgttatactgatcgccagaatcatactgattgcgctgggcttcacgggctttctcttccgccgcacgctgtgagggcagcttaataccgtaagacgccagttcacgacgagttggcacgcggatacgtttcggtcgtggcaactgcgggccaatcccctctttgacttgcggacgcggtccaccgctatttgccagactgaagactggcgcggcaacggttgcggcagcccccgtcgccagtgtcgcttttttcacgccagatgccagcggagaaacagcggcagcggcttctactggaggtactgctgcaacagaaggcgctttcaacgaagatttgatcggttctggttctttaaccggttctggaatcggttgataccaggccgcaagttgttcacgttcacgggctcgcttctcttccacttcttcaaaatagtaaagcggcggacgcgcgggttttgtctcttctacaacgggttcaggctccacaacaggctgctgttcaacggattgcggctgttggtacaacggctcctgagcggctggttgctgataagtttgctcagtctggtatgtagactgtggagcaaaagtggattgctgctcttcggcttgccaggcgttacctgccaccggttgttctggcgcaggggcgtaatacggctgttgtgcaggctgttccggcgcagttgcgtaatacggttgctgaacaggttgttccgccgcaggagcgtagtaaggttgttgcgcaggttgttcagctgcaggtgcataatacggctgctgcggctgtactggttgttgcagcggctcattatattgcactgcaggctgcgcatattgtgactgctgtgggtaaccttccggtgcaggagcaataaccggctctcccgtttgtggacccggtacaggctgccaggctactgtaggttgcgagggtggaacatcaacagaggcaacaggcggcgtctgagtcacaggttcaaccggcgcagcccagctttgtgtcgccgtggtagcagcagctgctacagcgacaggttcggtaattggcgcaccgtttaataatggatcgtattcgtcatattctggctgcgttgcacgattgcccgaaaataggacgtcgtccgggtcggcagccacaccgcgtgcagtgtaggtaatctcttcgtcatcatccatccgcttaccggagaacaacgcagcgtctgtttgccgccccatcggattaatgaatttttccgccaaccgtttacgacgcgctagcgcgccgcgaagaatacgggcacggcgtgattcatgctgtttgccgtggttttcatcttcatactcttcgtcatcttcatattcatcttcatcgacccaggtatcatcgcgacgggtacgattactggcgaaggtgagaatgtttaaaatccagccgccgagtttttcagcaatggtcacccatgaccaaccggtgaacagcgtcaggcccgcagcccaaacgcagagcagcgcaatagttcccccgctactgtgtagcagtggttgtagcgtagtacttagtaagctgccaatgacgccaccggaggcaaaataccagatatcgtcagcgttgattgccgccagaccacaggaggtaaggatgagcgccaaaacgccaatgatgcgtagcgaaacggcaaaataatcaatgtattcgtcgctggactgatgacgccaggcaaaccaacaaccgccgacaataatgacgggaatggtgtaagccatcacgccaaaaataaagaacagcgtatctgccaaccacgcaccgggcatcccacctaaattatggataggttcatgccaggccgtttgcgaccagctggggtccgaagggttaaagcttagtaaggcagccatcaaccagacggcaaacaggacaataaggatcagcaacgcctccagaaggcggcggccgctacttaactttgtcaatgtgacttctttgtcttcagtgtattcctggctcaagaaaggctctccaggttacaggcttttcctgcccgatgctaaaacggacaacagtaccaggttaccccagtactgttgctgtatggattaacaggagtgtaatcaaaatacgccgattttgcacctgttccgtgttagcgcgtcttaataaccagacgattactctgcttgacttcttccataacaacgtatgtccgtgtgtcattgacgccaggcagacgcagcagggtttcccccagcaacttacggtaagctgacatatccggcacgcgtgttttcaacaggtagtcgaaatcaccagatactaaatgacactcctgaatttcttcaagtttttgtacagcggtattgaattgttcaaacacatccggtgcgccacgattcagagtaatctcaacgaataccagaagtgatgcatccagataatgggggttcagcagcgccgtatagccctgaataaacccttgtctttccagccgacgcacacgctcaaggcacggcgttggggaaagtcccacacgtttagaaagctcgacgttagaaatacgcccatccttttgcaactcattaagaatgttacgatcgatacggtcgagatctttgccagggcgcttcttgctatctaccattattattgtctctctgtattccttccctactcctgtctgaccctgaaacatcactgttcagagtcgctacccgtcacgatagaccgaaatcatgaagattcacggcgcgcaatgcctgggtctacggtgagaagaccgttgccttgtggcagctatcgacatcacgaatggcgtctgtccacgccatacgtagatttcactagcacggtaaacatggtatttacatgcatggttatgcgcatataagaatactgtttttttcttcctcgaatgttttcgcaaaacaccaggggattgtcaaagcaaaacatcgatttttagtacaacatgccagatattcattaacaggggcgtttattcatcatttaatcggcttataaagcgggaaatttaagtagcagaggtgataatgacgggagaatttgacctgcttatcgatgctgccgattgcacaaattgttaacaaaatcgtcatactctttttttacgtctgtaaattccctacaatcctgcccattgtctgccaacaactatggggatctcatgggcacgaccaaacacagtaaactgcttatcctgggttcaggcccggcgggatacaccgctgctgtctacgcggcgcgcgccaacctgcaacctgtgctgattaccggcatggaaaaaggcggccaactgaccaccaccacggaagtggaaaactggcctggcgatccaaacgatctgaccggtccgttattaatggagcgcatgcacgaacatgccaccaagtttgaaactgagatcatttttgatcatatcaacaaggtggatctgcaaaaccgtccgttccgtctgaatggcgataacggcgaatacacttgcgacgcgctgattattgccaccggagcttctgcacgctatctcggcctgccctctgaagaagcctttaaaggccgtggggtttctgcttgtgcaacctgcgacggtttcttctatcgcaaccagaaagttgcggtcatcggcggcggcaataccgcggttgaagaggcgctgtatctgtctaacatcgcttcggaagtgcatcttattcaccgccgtgacggtttccgcgcggaaaaaatccttattaagcgtctgatggataaagtggagaacggcaacatcattctgcacaccaaccgtacgctggaagaagtgaccggcgatcaaatgggtgtcactggcgttcgtctgcgcgatacgcaaaacagcgataacatcgagtcactcgacgttgctggtctgtttgttgctatcggtcacagcccgaatactgccattttcgaagggcagctggaactggaaaacggctacatcaaagtgcagtcgggtattcatggtaatgccacccagaccagcattcctggcgtctttgccgcgggtgacgtgatggatcatatttatcgtcaggccattacttcggccggtacaggctgcatggcagcacttgatgcggaacgctacctcgatggtttagctgacgcaaaataattttacaaatcagtaacaaaagtaaagaaggcgacaccatgcgactatgggtcgcctttattttttccccgttgtaacattgctctgcaaataattctgataactcacctgctaagcgtgcaatgaataaatcccgtcaaaaagagttaacccgctggttaaaacagcaaagcgtcatctcccaacgttggctgaatatttctcgtctgctgggctttgtaagcggcatattgatcattgcccaggcctggttcatggcgcgaattctgcaacatatgattatggagaatattccccgtgaagccctgctgcttccctttacgttactggttctgacctttgtactgcgcgcatgggtggtctggttacgcgaacgggtgggttatcacgccgggcagcatatccgctttgccatccgccgtcaggttctcgaccgtctgcaacaagcagggccagcgtggattcagggtaaacctgcggggagctgggcgacgttggtactcgagcaaattgacgatatgcatgattactatgcacgctacctgccgcaaatggcgctggcagtgtcggtgccgttgctgattgtggtggcgatcttcccctctaactgggctgcggcgctcattctgctgggcacagcaccgttaattccgttgtttatggcgctggttgggatgggggctgccgatgctaaccggcgtaactttctcgctcttgctcgcttaagtgggcatttcctcgatcgcctgcgcggcatggaaacattgcgtatttttggtcgtggtgaagctgaaattgaaagtattcgttctgcttcggaagatttccgccaacggacaatggaagtgctacggctggcgtttttatcctccggcattctcgaattttttacctcgctgtcaattgctctggtggcggtctactttggtttttcctatctcggcgagctggattttggtcactacgataccggtgtgacgctggctgcgggttttctggccctgatccttgcgccagagtttttccagccattgcgcgatctcggtacgttttatcatgctaaagcccaggctgttggtgcagctgacagtctgaaaacgtttatggaaaccccgctcgcccatccgcagcgtggcgaggtggaattagcatcgaccgatccggtgaccattgaggccgaggatctgtttatcacgtcgccggaaggtaaaacgctggccggaccgctgaactttactttgccagcaggccaacgtgcagtgttggttggtcgcagcggttcaggtaaaagctcactgctgaacgcgctttctggttttctctcatatcagggatcattacgaatcaacgggatagaattacgcgatttatcaccagaatcatggcgtaaacatctctcctgggttgggcaaaacccacaattaccggcagcaacattgcgggataacgtactactggcgcgacctgatgccagcgaacaagaattacaagcagcgctggataacgcctgggtcagcgagtttctaccgctcctgccacaaggcgttgatacacctgttggcgaccaggctgcccgcctttccgtggggcaggcgcagcgcgtggcggtggcccgtgcgttactaaatccctgttcgctattactgttggatgaacccgctgccagccttgatgctcacagtgaacagcgcgtaatggaggcgctgaatgccgcctctctgcgccagacaacgttaatggtcacccaccagttagaagatcttgctgactgggatgtcatttgggttatgcaggatggccggattattgagcaaggacgttacgcggaattaagtgtggctggtggcccattcgccacattactggcccatcgtcaggaggagatttaaatgcgcgctttgctaccctatctggcactgtataaacgtcataaatggatgttaagtcttggtatcgtgctggcaattgtcacgctgctcgccagtatcggtctgttgacactttccggctggttcctctcggcctcagcggttgcgggggttgccggactgtacagcttcaactatatgctacccgctgcgggcgtgcgtggcgcagcaatcacccgtactgccgggcgttattttgaacgtctggtaagtcacgacgcgactttccgcgtgttgcagcatctgcgcatttacaccttcagcaaattgctgcccctctcccctgccggactggcgcgctatcgtcagggcgaattgctcaatcgcgtggtggcggatgttgatacgctcgatcatctttatctgcgcgttatctcgccgctggtgggcgcttttgtggtgattatggtggtgacaatcgggttaagtttccttgatttcaccctcgcctttacgctgggcggcattatgttactgacgcttttcctgatgccaccgctgttttatcgtgcgggaaaaagcaccgggcaaaatctgactcatcttcgcggacagtatcgccaacaactgacggcctggctgcaagggcaagctgagctgaccatttttggcgccagcgatcgttatcgcacgcaactagagaatacagaaattcaatggctggaagcgcaacgccgtcaatctgaactgaccgcattgtcgcaagcgataatgctgctcattggcgcgttagcggtgatcctgatgctgtggatggcgtctggcggcgttggcggcaatgctcaacccggcgcgttaattgccctgtttgtcttctgcgcgttagccgcgtttgaagcactggcaccagtaacgggtgcatttcagcatctggggcaagtcattgcctctgccgttcggatcactgatttaacggatcaaaaaccggaagtcaccttccctgatacccaaactcgtgttgccgatcgcgtttcgctgacattacgggatgttcagttcacttatccggagcaatcccaacaggcacttaaagggatttctcttcaggtaaacgccggggaacatattgcgattctcgggcgaaccggatgcggcaaatcaacactgttacaactgctgacccgcgcttgggacccgcaacagggagagattttgcttaacgatagccccatagccagcctgaatgaagcggctctacgacagaccatcagcgttgttcctcagcgagtgcatctgtttagcgccacgctgcgtgataatctgttactcgcctcgcctggcagtagtgatgaggctctggcggagagcttgcgtcgcgttggtctggagaagctgctcgaggatgcaggtctcaacagttggttaggtgaaggcggacgccagctctccggtggtgaactgcgccgtctggctatcgcccgtgcgctgttacatgatgcgccactggtgttgctggatgaacctaccgaaggcttagatgccacaaccgaaagccagatccttaaattgcttgcagaaatgatgcgtgagaaaacggtgttaatggtcacccatcgacttcgcggactctctcgtttccaacaaataatagtgatggacaacgggcaaattattgagcaaggtactcacgcagagctgcttgccagacaggggcgttattaccagttcaagcagggtttgtaagctattattgaacgatccgacttgcgtggagttttgcggtcatgcgcctggttcagctttctcgccattcaatagccttcccttccccggaaggcgcattacgtgagcctaacggcctgctggcacttgggggcgatcttagccctgcgcgcctgttaatggcttaccagcgtggtatttttccgtggttttctccaggcgaccccatcctctggtggtcgcccgatccccgcgcggtgctatggccagaatcactgcatatcagccgtagtatgaagcgatttcataaacgctcgccctatcgtgtcacgatgaattacgcttttggtcaggtcattgaaggctgtgccagcgatcgcgaagaaggaacctggatcacgcgtggcgtggtcgaagcctaccatcgccttcacgaactcggccatgcccactccattgaagtctggcgtgaagatgagcttgtcggcggtatgtacggcgtggcccagggaacgctattttgtggcgagtccatgttcagccggatggaaaatgcgtctaaaacggcgcttctggtattctgtgaggaatttatcggtcatggcggtaagcttatcgactgccaggtccttaacgatcacacagcatcgcttggtgcctgcgaaattccccgccgggattaccttaattatctcaatcaaatgcgcctcggacgattgccgaataatttctgggtaccacgatgcttgttttcaccacaagaatgaatgttttcggcacatttctccccagagtgttataattgcggtcgcagagttggttacgctcattaccccgctgccgataaggattttttcgcgtcaggtaacgcccatcgtttatctcaccgctcccttatacgttgcgcttttggtgcggcttagccgtgtgttttcggagtaatgtgccgaacctgtttgttgcgatttagcgcgcaaatctttacttatttacagaacttcggcattatcttgccggttcaaattacggtagtgataccccagaggattagatggccaaagaagacaatattgaaatgcaaggtaccgttcttgaaacgttgcctaataccatgttccgcgtagagttagaaaacggtcacgtggttactgcacacatctccggtaaaatgcgcaaaaactacatccgcatcctgacgggcgacaaagtgactgttgaactgaccccgtacgacctgagcaaaggccgcattgtcttccgtagtcgctgattgttttaccgcctgatgggcgaagagaaagaacgagtaaaaggtcggtttaaccggcctttttattttgtgatatgtatgaagtactttggaagtataagtccgtaacttgtctcgatgtagatatactgcacaacttgtttacagtatgagcaaacaataattatcattaaaattcttcttgaccgttttactccaactccctatagtagcgccccgttgccacccatgaggtttggtagcaaaacaatttggtgaggtgtccgagtggctgaaggagcacgcctggaaagtgtgtatacggcaacgtatcgggggttcgaatccccccctcaccgccatattta

SEQ ID NO: 213 - DNA, 27222 bp, Escherichia coli
  source 1..27222: mol_type = genomic DNA
catctaacccattcatgtttggggttttttacaagcctactttttaatttagatgaggttttgttatatatgttgtttccaatatatttttcatttgtcaaaatttgatgtatttttgcacgagtccataatgttccattttctgcaggtatgttctgttcatttaatctctcagcaataatgaattctgggacgttattatctataaagagatcatatattctatttacaatttttatttcattttttggtcccggaattaatattaccctatctgtttgaatactctttcttttgcggaaactcaatatttctttagctatgccattttcgtctactaaaagacgtctcagcccataaccagccataccgccttgatgataaccaagctttattaaatttacttgccctataaataccttttcagatagattcctgctgtgatatgcagcactagatctttttatattcagtataacagaggactctaaagggaaatctttagtgggtataggttcggaacaatatataagatctacaccatttctctcaaatagaaaggaataatatgccgcttcatcactattttgaaaacgaccaaaacggctcacatcataaaataatacagcctgtatatctattttcttttgttctacatcgctaagtaactgctgcaaagaatgcctgcctacgatactgactccgctcttacctgcatcatcgtaggtataagcgatttccatattgttcttttcagcataatctttgatatattcggactgattatgtaaagaatattgctgatggtcggtagacatcctcaagtactgcgcgaccctaactctatgatttttgtcattttcgctagccatgcacgaaacctcatggatgattcaatacaatgtagtggataaaattgatcaaatttcaaccgaattcaactgttttatcattgattagagcgaatttggtagatcttcgaggtgtatgataatcgagaagagatgtgaattatttagctgatatgaccgacagctttcgttatgtggactcaatgtccccatttgtaaatggctatgcttagtccacataggttaatggtgtgattattaattctttaactaaatcaagatagttaatccatcatgggagagttatgcggcaataactttgcatttttgagacgaaacatagtcactccaccattgcatgagaaccacccgttcagtgagatactctgcacgattgtaggctgcaattatttcatctttcttcgagtgggcaagggcggcttctaagacatcagtcctaaacttgccagactcctcagcagccgttctagcaatggatcgcataccgtgagctacaagctcacctccgaaacccatacggattatggccgcattagctgtttgttcatgcatgtgattgagtggagctttgatactggggaacacccactctctatgcccgctgatgactttcattaaatccaaaactcgcaaagcttctttgctcagtggaactttgtgaggcttcttcattttcataaactccgccgggatgttccacatgccagtttcaatatcaatatctgaccatcttgtgcgaacagcttcacctgggcgaacccatgtgagaagttgccactcaatcagtagccttgtttccaaacggatagaagcattgtttagagcaaccaagaagcgagggagttcggaagggggtaatgctggcatattctgtttttttggcttgctgaaccgttgccccaggttgtctgccgggttgaattctatgagttcttctgttgctgcatagcggaaaatttcattcaggcgggatatgatgcggcgaagtgtttcaaggacacctcgtttttctatgggttctaaatgctgtttaagcattttagggcgaatctccttaattggggtatcacccaatgtggaaaagatatttctctctaggcttcgccagatgtcgttagcatgatcttgggagatgcctgacgttttgactttctcatcaagccacttcttggnnnnnnnnnnaatgtatgttccgtggcatctttcagtgcattggctttttggttgttatgaacttgggggtctataccatttgtaagcaacgacaagtattcatcacgtaaagctcgtgccttcgcaagtgtaaggtgaggataggttcctaagctcaccttagttcgctttttggtcacaggcactgcatatctgaaataccaatttttcttccctcccttcgccaggggagcgattcgcaacagcaaaccatcgccgtcaaaaaggttaacctctttttcggcaggtttggtgcttttgatttcagtgtcagtgagcttcttagcgattttggccatgtttgggaccctcgattttaggacccatcttcgtgggtcccattcagggtgccataactcgtagttctcagcaattctcactagactacaatagacgtaaaaaagcccgcagagcttgtgctgtgcgggcttagtagactttactgaacttcagtacatcaatatttggtggagctggcgggagttgaacccgcgtccgaaattcctacatcctcggtactacatgcttagtcagtctttacattcgcttgccagctgcggacggacacgccactaacaaactagcctgattaagttttaacgcttcaaccccaggcagggcttccacgcgatctcttttgggtttgacctctcttgatccccgtcctaagagcggaggctagggagagagggctctaagcaggttattaagctgctaaagcgtagttttcgtcgtttgcgactattttttgcggctttttacgaggccaaccgcccctcggcatgcaccttgggtttcgcaaatcccgtcgaatccagaatcagccccaatgtgtaaaggtaagtataccagatttatgagcgccatgaccagcctcaatggcgttatcgttaaagatttagcacccatgtagcctgatttttattcgattaagcaatgggatggcaacatttgtgtcggatgtgatagccaataagatgttcattcgcgccgccggagagggaggcgcggtgaggaactggtcaataattggagtgcaggtttaacggtgggcgttttnnnnnnnnnngatacgtgctttatccacctgccattcgcgttctttgatatctgaacgtttatcgtgctgttttttacctttggcgacgccgattttcactttgcaccaggcatttttccagtacagggagagcgccactacggtatagccttctcgattgacgcgaccgtacaatgagtccagttcgcgttggttgagaagtaacttgcgggtacgggtaggatcgcacaccacatgcgtggaggccacggccattggcgtgatgttagcgccaaacagaaatgcctctccgtcacgcagaaggacgtagctgtcgctgatattggcttttcctgcgcgcagggatttaacctcccagccttgcagggcaagtcccgcttcgaactcttcttcgataaagtattcgtgacgggcgcgcttgttaagcgcgatggtcgctgaaccaggtttatgtgcttttttcttcgtcataagcgtcgtgaatcatcggtaatctgaaatcgaaaacaccccatatcaatcctgcgggggacaaggctctatcttagcatgaacccgatgttacccagcgccgggatagcgttttttttacagcaggataaatgatattatttgttggatttttgttgatggaaattgttatgcctcagattagccggaccgcactggtaccctacagcgcggagcaaatgtatcagttagtgaatgacgttcagtcttatcctcagtttttgccgggttgtaccggaagtcggattctggagtccactcctgggcagatgactgcggcggtagatgtctctaaggctgggatcagcaaaacgtttactacccgcaaccagttgaccagtaaccaaagtattcttatgaatctggtggatgggccgttcaagaaattgattggtggatggaagtttacgccgctgagccaggaggcgtgtcgtatcgagtttcatctcgactttgagtttaccaataagttgattgaactcgcctttggtcgcgtgtttaaagagctggcggctaatatggtccaggcttttacggttcgtgcgaaagaggtttacagtgccaggtaaaattgccgttgaggtggcttatgcgctacctgagaagcagtacctgcagcgagtgacgctgcaggagggcgcgacggttgaagaagctattcgcgccagtggcttgctggaattgcgtaccgatatcgatttaactaaaaacaaagtcggcatttacagccgtccggcaaaactaagcgatagtgtgcatgatggcgatcgggtggagatttatcgccctctcattgccgatccgaaagagcttcgcaggcaacgagcagaaaaatcagcgaataaataacagacagaaaaaaggtgctcattgagcaccttttttaacgtctttgagagcaactttattattagttaccactcagcgcaggtttgttatcaatattggtcaacacaccgctactgttaaaggtcagcgtcagcgtttgctgcgttacaccttcatgacctggttgctggcggaagacatagaaccaggtattcgtaccaaatggatcggacatcagcggtgtacccaatgcgtacgcaacttgttgttgcgtcatgccaacacgtattttggatacgtcgttagcggtcagatagttcccctggttgatgtcaggacggtaaaccactcgctccagagtggaacagcctgcggtcaacatcaatagtactgctgctgcagcagtcagcgttttacagcgcatagtgatttgattccttttcgggcccgagcagtacgtggctcatctgtaatatgccgatgataatagacctttcatcactttaaaaccttttgctttccggtcttacggcgttttgctgtttactctgaccgtgaagcaggaaaaaagtttacgctgcaagcagttctttcgcattcgccagtgtattacgtgtgacttcactgccaccaagcaggcgcgccagctcttgtaaccgcgcttttttattcagggattgcatatgcgtttctgtcatcgcaccatcggtttctttgctgacaaaatagtgttgatgaccacatcccgcgacttgtggcaggtgggtaacacacatcacctgagttgattcgccgagttgacgcagcagtttgccgacaactgccgctgttggaccgctaatccctacatccacttcatcaaaaatcagtgccggggtttccattttacgcgccgtgatgacctggattgccagtgcgatgcgggacaattcaccaccggatgcgactttggcaataggctgcattggctgacctgggttggtggttacccgaacctcaatacgatcggcaccgtcaacgcccaggtgatgctcgtcaaatttaacatcgatcgtaaactgcccatgcggcattgagagcgcatgcatactgtcggtgatcagctgtgcaagttcttctgcatattgctggcgttgttggtgtaatgcgcgcgcgatttccagtgcctgctgatgatgtttcgttaccgccagcgcaagcgtttcttgtgagtcggcctgatcgtccagttgctgctgttcttccagtagcgactggtaatactgtggcaatgcctcagggctgacgtgatgtttacgtgccagcgaaatctgttttgagatgcgctgttcaagttcaaatagtcggttgggatcgagatccagacgatcgcagtagtggcgcagttcatcgctggcttcagcaatctggatggtagcttcttccagcatatcaagtacgccggacagtttgctgtccatgccaatcaattcgctcaccagttgtttagccgtgtaaagctgactttgcaggtttgcgtcttcaccgtcggccattaatgccaatgcattctggctggtggtcagcaattgaccgctgttcgccagacgtttgtactcttcgtcgatttgttcaaactctccgggctgtggattaaattcgttaagttcttttaattggtattgcagcagttccgcacgggcagcgcgttcctgacttaactgttgatgatgcgcgaggtcacggcagctttgatgccacaactgataacgtgctgtcatttcctggagtagagaggtttcattggcatagccatcaagcaggaacttttggtgctcgggtttggtgagtaactgatgagcgtgctgaccatggatctgaatcagcaactgacccagttcgcgcagttgtgacagaggaacagctgtaccgttgatgaaaccacgggagcgaccatcgctgctgatcacgcgacgaagcaaacattcatgcccgtcttcaagctggttttcttccagccagcgcagagccgctggcgtatctttcagagaaaaacgggcgcacaggtcagcgcgagcagcgccggtacgcaccatgtcggcttcagnnnnnnnnnnnnnnnnnnnnnnnnnnnnnnnnnnnnnnnaaagaccgagggcatctattgcaatagatttacccgcgccggtctcgccagttattacggtcatgccgctatgaaaatcaatctcaagctcacgaacgatagcaaagttgctgatggtcagttgtgccaacatagtcgttttcctgtatgaaaaaccattactgttattgtgtacagtataaactggttttatatacagtaaagaggctggcgtaaaattagaataatttttttgaccagccgagcttggtgcttaatgtgttgaaataactgtaatctttcggatgaatcagattcagatggtaatcacagcgacgaatcaggacatcttcaccttcctgaatcggcagtgctatctggctgtcgcaactgatttccaggtcgttacggcgatgcgaaaaacgcagacggatcgtgctgctgctgtttatgaccagtggtcgtgctgacaacgtatgcgggaacatgggcaccagggtaatcgcatccagagagggggtcagaataggaccgcctgcagagagggaataggcggtggagcctgttggcgtcgaaataattagtccatcagatcgctgagaaaacgcaaagatctcgtcgatatacacttcgaactcaatcatatgcgccactttgcctggatgaagcaccacttcatttatcgcggtgctgatgcgtttctggcaatcttgctgacagacttgcgcttccagcaaaaaacgtttctcgctgatgtagtggccttccagcacatcggctaactgttgctgggcgttatcggggtcaaggtcagtcaggaaacccaggttgccacggttgattccaataactttaatatcgtaacgggcgagtgtgcgtgccgcgcccagcatattaccgtcgccaccaacgactaccgcgagatcagctagttgcccaatctccgcgagcgtgccagttttcacattcttcagttgcagttcgtgagcgatttgttgctcaacgatgacctcgtaaccttttgtgcacagccagcggtagagcatttcatgtgttgtcagtgcagtggggtgccgtgggtgtcccacaatgccaatacacttgaaatgattattcatttttccgaggtccttgttgcgaagattgatgacaatgtgagtgcttcccttgaaaccctgaaactgatccccataataagcgaagttagcgagatgaatgcgaaaaaaacgcggagaaattcatgagtagtaaagaacagaaaacgcctgaggggcaagccccggaagaaattatcatggatcagcacgaagagattgaggcagttgagccagaagcttctgctgagcaggtggacccgcgcgatgaaaaaattgcgaatctcgaagctcagctggctgaagcccagacccgtgaacgtgacggcattttgcgtgtaaaagccgaaatggaaaacctgcgtcgacgtactgaactggatattgaaaaagcccacaaattcgcgctggagaaattcatcaacgaattgctgccggtgattgatagcctggatcgtgcgctggaagtggctgataaagctaacccggatatgtccgcgatggttgaaggcattgagctgacgctgaagtcgatgctggatgttgtgcgtaagtttggtgttgaagtgatcgccgaaactaacgtgccgctggacccgaatgtgcatcaggctatcgcaatggtggaatctgatgacgttgcgccaggtaacgtactgggcattatgcagaagggttatacgctgaatggtcgtacgattcgtgcggcgatggtaactgtagcgaaagcaaaagcgtaatttctgttttcgtaataattcacggccctgcatgcgaatgcagggccgttttcgttactccgccacactctcgcgcagcggtttcacaggaaaaacttttacctgcttaatcatattgtcctgtacgtcgagaatatctatatcgtactcgccaatacgcacgcgggtgcctgcgacagggatctcttccagtgcctcaagaatgacgccattaaccgtgcgggcatcatcttccggtagatgccagttaaaggctttgttgatttcccgcacgttggcggtgccatcgataatcaccgaaccgtcgttttgcggcgtgacctcttcggcaagtgttggcgacatcgacgtagtgaaatcgccgacaatctcttccagaatatcttcaaccgtcaccagcccctgaatgtctccatactcgttgacgaccaggccgactttctttttgttgcgctgaaactttaccaactgcgtgctgagcggcgtaccttccggcacaaaatagatctcgtccgcggcgcgcagcatggtttctttggtgaactcttttttctccgacatcaaccgccaggcttcacgtactcgcagcatactgatggcgtcgtccagcgaatcacggtagagcacgatgcgcccgtgaggtgagtgggagagttggcgcagaatcgatttccagtcatcgttgatatcaataccgataatttcactgcgcggcaccatgatgtcatcaacggtcattttttccagatcgagcaccgacagcagcatatcctgattgcgacgggaaatttgtgagcgtgattcgtgcacgatagtgcgcaactcttctttgctcaaagagccgctaaccacgatatcggttttgatacccatcatgcgcatcagcatacgggtgatagcattcagcaaccagaccagcggcatcatcaaaatttgcagcggagccagcagaaaactactcggataagcgactttttccgggtacagcgcggcaatggttttcggcaatacctcagcaaataccagtacgacaaaagtcagcacaccagtcgcaattgccacgcccgcatcgccgtacaaacgcatcccaacaatagtgccgagcgcggaggcaagaatattgaccaggttattgccgattaacaccaggcttatcaggcggtctggcttacgcagcaatttttcgacgcgtttggccgagcgattaccctgtttcgccatatgtcgcagacgatagcggttgagggtcatcattccggtttcggacccggaaaaataggctgaaatgatcaccatgatgatcagaataatgatcaacgtagtagtagaaatgtgttccaggggaaactccttttctgggtttagctgattaactgctggacaattcggctgccgaagtaggccagtgtcagaattaccgcgcccgcaacgttaaaccagacgacgcggcgtccacgccatccttcatggtaatgtccccacagcagcacaatatagacaaaccacgccacgatagagagcacagccttgtcgatattttccatgctaaataggttgtgcatgtagaacaggccagtgcaaagcgtgagcgttagcagcaccacgccaatctgcgtgatgtggaacattttacgctcgatactcatcaatggcggcatttcctggttaaatgccagcttcttgttcttcagttggtaatcaatccacgccagttgcagcgcgtacagggcggcgataattagcgtggcataggaaaagagcgataagccaatgtgcaccagcatcccaggcgttgcttccagatgggtgatgtattcattgggcatgaaggtcgccagcgccaggttgataagcgcaaaggcatagacaatgggtagcagcaaccagccacgattgcgagaagccacaatggtcattaccgtacagatcatcaaactgaccaatgaaccaacgttcagcaggctgaggttttgtccgctatcaccgtcgggcaggatgcgggcttccagagcgattgcgtggcagaccagcgcaatgaccgcagaaataatagccatgcgccgccagccgccgtttttttgcagcagaccgggaacaatcagcgcaagactgacggagtaggcgacaagcgcgagcagagcaaaaacgggcatagtaatgtcgacagtttgagcaataagaaagagaagcagtatagcgtcaggtgaacgctgctccaaccgttgcataacaacaaagacgccttcatgttatactgcggcaaaatactgatgatgtgtcgcgattgcggccaaccgtttccaccccaggcgagagacaatgtttgataatttaaccgatcgtttgtcgcgcacgctgcgcaatatcagtggccgtggacgcctcactgaagacaacgtaaaagatacgctgcgcgaagtgcgcatggcgctgctggaggcggacgtcgctctgccggtagtgcgtgagtttatcaatcgcgtaaaagagaaagcggttggtcatgaagttaataagagcctgacgccggggcaggagttcgtcaaaatcgtccgtaacgaactggttgcggcgatgggcgaagagaaccagaccctgaacctggcggcgcaaccgcctgcggtcgtgctgatggcgggcctgcaaggtgccggtaaaacaaccagcgttggtaaactcggtaagttcctgcgcgagaagcacaagaagaaagtgctggtggtttctgccgacgtttatcgcccggcggcaatcaaacagcttgagacgctggcagagcaggtgggcgttgatttcttcccttctgatgttggtcagaagccggtagatatcgttaacgcggcgctgaaagaagccaaactgaaattctacgacgtgctgctggtggataccgctggtcgtctgcacgttgacgaagcgatgatggacgagatcaaacaagtccatgcgtcgattaacccggttgaaaccctgtttgtggttgacgccatgaccggtcaggatgcggccaatacggcaaaagcattcaatgaagcgttaccgcttaccggcgtagtgttgaccaaagtggacggcgatgcccgcggcggtgcggcgctctctattcgtcacatcactggcaaaccgatcaagtttctcggtgttggcgagaaaactgaggcgctggagccgttccatccggaccgcatcgcgtcgcgtattctcggcatgggcgacgtactgtcgctgatcgaagatatcgaaagcaaagttgaccgcgcgcaggcagagaaattagccagcaagctgaaaaaaggcgacggcttcgatctcaacgattttcttgagcaactgcgccagatgaaaaatatgggcggcatggctagcctgatgggcaagctgccgggcatggggcagatcccggataatgttaagtcgcagatggacgataaagtgctggtgcgtatggaagccatcatcaactcgatgacgatgaaagagcgcgctaagccagaaatcatcaaaggttcgcgtaagcgtcgtatcgctgccggttgcggtatgcaggtgcaggacgttaaccgccttctgaagcagttcgacgacatgcagcgcatgatgaagaaaatgaagaagggcggaatggcgaagatgatgagaagcatgaaggggatgatgccgccgggatttcctggtcgctaaatgaccttatgcgacagagttattaactgctgattgcattttctccagaaatcagtaaaattttcgggcttttaatatgacaccggactccgttcctcgatggggtccggttgttttattcacacaagaggatgttatggtaactattcgtttagcacgtcacggcgctaaaaagcgtccgttctaccaggttgttgtcgctgacagccgtaatgcacgcaacggtcgcttcatcgagcgcgttggtttcttcaacccaatcgctagcgaaaaagaagaaggcactcgcctggatctggatcgcatcgctcactgggttggccagggcgcaactatttctgatcgcgttgctgcgctgatcaaagaagtaaacaaagcagcttaatctgtcacggtggtcatgatgagcaaacaactcaccgcgcaagcacctgttgatcccatcgttttgggaaaaatgggttcgtcttacggtattcgtgggtggctcagagtgttttcttccaccgaagacgccgaaagcatttttgactatcagccctggtttatccagaaggcgggtcagtggcagcaagtccagctggaaagctggaagcaccacaatcaggacatgatcatcaagctgaaaggcgttgacgatcgtgatgcggcgaacctgctgacgaattgtgaaattgtcgtggattcatcgcagctgcctcagcttgaagagggggactactactggaaagacctgatgggctgccaggtagtaaccactgaaggctacgatctcggtaaagtcgtcgatatgatggaaaccggatctaatgacgttctcgtcattaaggcaaacctgaaagatgcgtttggtatcaaggaacgtctcgtaccgttcctcgatgggcaggttatcaagaaagtcgatctcactactcgttcaatcgaagtagattgggatcctggtttttaaaccaccggataaacggtaaaagacggcgctatgtggattggcataattagcctgtttcctgaaatgttccgcgcaattaccgattacggggtaactggccgggcagttaaaaatggcctgctgagcatccagagctggagtcctcgcgacttcacgcatgaccggcaccgtaccgtggacgatcgtccttacggcggcggaccggggatgttaatgatggtgcaacccttgcgggacgccattcatgcagcaaaagccgcggcgggtgaaggcgcaaaggtgatttatctgtcaccacagggacgcaagcttgatcaagcgggcgtcagcgaactggcaacgaatcaaaaattgattctggtgtgcggtcgctacgaaggtatagatgagcgcgtgatccaaaccgaaattgacgaagaatggtcaatcggcgattacgttctcagtggtggtgagttaccagcaatgacgctgattgactccgtttcccggtttattccgggagtactgggacatgaagcctcggcaacggaagattcctttgctgaaggattactggattgcccgcactatacgcggcctgaggtgttagaagggatggaagttccgccagtgttactgtcgggcaaccatgccgagatacgtcgctggcgtttgaaacagtcgctgggccgtacctggcttagaagacctgaacttctggaaaacctggctctgactgaagagcaagcaaggttgctggcggagttcaaaacggaacacgcacaacagcaacataaacatgatgggatggcgtaagcccccgagatatcagtttacccaggataagagattaaattatgagcaacattattaagcaacttgaacaagagcagatgaagcaggacgtaccttccttccgtccgggtgataccgtggaagtgaaagtatgggttgttgaaggttccaaaaaacgtctgcaggcattcgagggcgtggttatcgctattcgtaaccgcggtctgcactctgcattcactgttcgtaaaatttccaacggcgaaggcgttgagcgtgtcttccagactcactctccggtagttgacagcatttctgtcaaacgtcgtggtgctgttcgtaaagctaaactgtactacctgcgtgagcgtactggtaaggctgctcgtatcaaagagcgtcttaactaagatttcgcttaagcgacatcctgttaagaagggctggccaattggctggcccttttttatctgtttgctggtgttttaaggggtagtaatcaccactgcgacgcggcggttctcggcgcggccctgggcggtcttgttactggctatgggatatttttttcctaaaccctgtgtggtgagattgctgcgtggaatttgtccacccatagcccatgcatcggccacgacattcgcccgtttcaatgataagccttcgttgtaactgtcttcaccatagttatcggtgtgtccatccatacgggcatgtgttagccctgtcgaggccaatttggctgccatggtttggatctgttgctggctttccgggagcaatttgtagtcattttttgcgaacagaatggcatctgataagcccagcgaccagtcgccggcggattcagtaaatccataagattgcatagcggcgacttgctcaggagtaaactttccctgaggggactggcagccagtcagtattagtgaggtgaaaatcaggggtgctaccaggtgctttatcatatcgatatatccttgttatctcaccagcttttcggcacgctggtgtttggcctgatacatattgtgatcggcaagctcttgtaatttttccgcagaggcgtgctcaatggtcatcgcgtaaccaatgcttaatgtcatggtggtctgatgaccattatgaagatcaaacgggagattaaagatttgtgtcagtgctgagcatatctgctgcacttcagattctgactgtacatcatagagcaccatagcgaattcatcgccgcccaggcggtatgctttatgtcgcagcccgccaacttcagctaaccgttttgcgatttcaatcaagactctatcgcccgtcgcatgaccccaggtatcattgatgtatttgaaattatcgccatcaagaaatagtaacgccgacgtttttcgggcatcggaattgttcatcaacgtgttgatgccgctacgaaacgctgcgcggttagccagcccggttaatgggtcatgtagcgcggtacgtagaagctgcgcatttttagcctgtaaacgaagctgccactcttccatttcatccagcagactgttgaagtcgagagcgaagcggtgaaactcagcgatacgttcttccgaaactcgtcgggaaaaattgcggttggaacgcacatcatgtacgacatcggtgatatttttcagtgcttccaccaggccattgtgcaaatggcgggtgagggtaattgcgatgcctgatgccagcagaatacaaccggtcagtacggcgagcgaaaaccagataaaatggctgattgaactgtcgcgagcggttaagcgtacttcgccaatggtttcaccattgtgacgaatcggctgaatgatgggggcggggaagagccagtggcttatgaaattgctgaaagtatcgcctggatccttacgggtgtaatgccaggacgccagaatattttgctgcttatcacgtacttctgcagttgaaaattgcccttgctggcccagcgctgccagtgtttcagttgctgcagggccatcggcaaaaacgacagctgcttccagactgtaagtcattgttgctgctgtcagtgccaggtttttttgcgcgtactgtttcagggtcagcaccgaggtcacggaaagcagcaaccagatcagcatcatagtgataaatatgctggtgatactgatgttgcgtaatgctcttttaaacgtggggcgcttattaagagaattatcgttatccatcatttttcttccgtgcgagcattaagacatccgggttgacctttacaccgctacgcgataaggcatccaggtttacggcaaatctgacgtcattattgtggatgatcagacaaaaggcgctaccaataatgcactcggtattttgttcggcaattaataataacgcctttgacggatattgttcggttaattccatctggaatgtcggtgactcgttgccaaaataaaaaccattgcagcctgaaatcatcgcctcttgttgagtgtgaatgatgacaggcagataaggcaaagatgtcgcggcattctcttgtagggcggtactaaaacgtgaagatgaaaagatacataactttggtggccctgatagcgcaggccagcgggtgtaactgacaataccggaaaccatcatacgcacgtttttcgcaacgtcagaaggctcctgagcgagtattggtgctcccgtaagcaggagaatcagaagtaagaacagtcggtgagaaaaacgcattcagggatccccaccatcttcgctcgaaatgcatcgatattttttcagaatgctcattaaaatatcattttttcatgcgatcgtcatcaatgtgagaaataaaacacaatgagtaaaatcttatgtttaatttatttgtggggttttaattaatttaatcgtattgtgctggcattttcatcagcccctttttgccatacttcatgcagttggctggcattttcaacattgttgcagctggcaggaaagcttttaccggaaagtcctcgggcataagtaaaatcggtctggcaagttttcttttgtccttcggcatatcctttaaggtatagaccgcgatccgcctgtgaatcgctaaatgcatcgtcatcttttatggcgctgcccgatatcgcatcttccataccaacatcataccagtcggtgctggtcaaggttggcgcgtgagtataaggatcaatctgacatccgctaaccagtaaagccaacaagggggcgataaactttttcatcatttctttctcctttttcaaagcatagcggattgttttcaaagggagtgtaaatttatctatacagaagtaagggttgaaatcgcgactaaattgcctgtgtaaataaaaatgtacgaaatatggattgaaaactttactttatgtgttatcgttacgtcatcctcgctgaggatcaactatcgcaaacgagcataaacaggatcgccatcatgcaaaaagacgcgctgaataacgtacatattaccgacgaacaggttttaatgactccggaacaactgaaggccgcttttccattgagcctgcaacaagaagcccagattgctgactcgcgtaaaaccatttcagatattatcgccgggcgcgatcctcgtctgctggtagtatgtggtccttgttccattcatgatccggaaactgctctggaatatgctcgtcgatttaaagcccttgccgcagaggtcagcgatagcctctatctggtaatgcgcgtctattttgaaaaaccccgtaccactgtcggctggaaagggttaattaacgatccccatatggatggctcttttgatgtagaagccgggctgcagatcgcgcgtaaattgctgcttgagctggtgaatatgggactgccactggcgacggaagcgttagatccgaatagcccgcaatacctgggcgatctgtttagctggtcagcaattggtgctcgtacaacggaatcgcaaactcaccgtgaaatggcctccgggctttccatgccggttggttttaaaaacggcaccgacggcagtctggcaacagcaattaacgctatgcgcgccgccgcccagccgcaccgttttgttggcattaaccaggcagggcaggttgcgttgctacaaactcaggggaatccggacggccatgtgatcctgcgcggtggtaaagcgccgaactatagccctgcggatgttgcgcaatgtgaaaaagagatggaacaggcgggactgcgcccgtctctgatggtagattgcagccacggtaattccaataaagattatcgccgtcagcctgcggtggcagaatccgtggttgctcaaatcaaagatggcaatcgctcaattattggtctgatgatcgaaagtaatatccacgagggcaatcagtcttccgagcaaccgcgcagtgaaatgaaatacggtgtatccgtaaccgatgcctgcattagctgggaaatgaccgatgccttgctgcgtgaaattcatcaggatctgaacgggcagctgacggctcgcgtggcttaagaggtttattatggttgctgaattgaccgcattacgcgatcaaattgatgaagtcgataaagcgctgctgaatttattagcgaagcgtctggaactggttgctgaagtgggcgaggtgaaaagccgctttggactgcctatttatgttccggagcgcgaggcatctatgttggcctcgcggcgcgcagaggcggaagctctgggtgtaccgccagatctgattgaggatgttttgcgtcgggtgatgcgtgagtcttactccagtgaaaacgacaaaggatttaaaacactttgtccgtcactgcgtccggtggttatcgtcggcggtggcggtcagatgggacgcctgttcgagaagatgctgacactatcgggttatcaggtgcggattctggagcaacatgactgggatcgagcggctgatattgttgccgatgccggaatggtgattgttagtgtgccaatccacgttactgagcaagttatcggcaaattaccgcctttaccgaaagattgtattctggttgatctggcatcagtgaaaaatggaccattacaggccatgctggcggcgcacgatggcccggtactggggttacacccgatgttcggcccggacagcggtagcctggcaaagcaagttgtggtctggtgtgatggacgtaagccggaagcataccaatggtttctggagcaaattcaggtctggggcgctcggctgcatcgtattagcgctgtcgagcacgatcagaatatggcgtttattcaggctctgcgccactttgctacttttgcttatgggctgcatctggcagaagaaaatgttcagcttgagcaacttctggcgctctcttcgccgatttaccgccttgagctggcgatggtcgggcgactgtttgctcaggatccgcagctttatgccgacattattatgtcgtcagagcgtaatctggcgttaatcaaacgttactataagcgtttcggcgaggcgattgagttgctggagcagggcgataagcaggcgtttattgacagtttccgcaaggtggagcactggttcggcgattacgcacagcgttttcagagtgaaagccgcgtgttattgcgtcaggcgaatgacaaccgccagtaataatccagtgccggatgattcacatcatccggcaccttttcatcaggttggatcaacaggcactacgttctcacttgggtaacagcccaataccttcattgaacgggtaatttcccctaactctttcaatgctttttgcatttccgctgattcaagattggcctgaatatccagataaaacatctcttcccatggattaccgtgaatcgggcgtgattccagacgggtcataatcagattgtggttgcgcagcaccagcaacgcttcaaccagcgcaccggcttgttgcccggtcgccattaacaacgtcgttttcgccggaacctgatcagacacgttaatggctttacgcgccaacaccacaaatcgggtgaagttttgtcgctgattcgcttcaatacgctccagtacctgcaaaccgtacaaagtgccgccagcttcgcttcccaacgcagcaacatgcggtgattttgcctgtgcaaccttttccattgccgcagacgtactttcggtatattcaatcttccagtgcggataacgattaaggaatttgctgcattgctggaacggctgtggatgactgtagaccgtgttgatggtagataaatctgtggtgccggaaaccagcaggcagtggtcgatggtaagggtcatttcgcccacaatcgacaagcaggtatgttgcagcagatcgtaaacgtcgtttatggcaccggagctggtattttcaatcggtacgacggcatagtcggcctggccggtttccacctgattaaaaatatcggcaaatttggcgcagccactttcaatgaattgctcaaagtgacgggcagcgtactgacgagcggcaagatgtgaataggagcctttggggccgagaaaagcgatgcgtgctgagtgcggattaattttattgagatgttgttggagcaaagcctgctgagttaatacggaatcttcaatgatgagctggaacaggcgagtaatgtaatgggcgtccagatggtgcgctttaccgagcgtaattaatctttccagtaaatcgcgttcacgatcaatatcacgtaccgggcgatgcgagagcagtttggcttttcccacctcgacggccagttcgcgccgctctgcgagtaatgctaataatttttcatccagcgcgctgattttctctcgcagcgccagtaacgggttttccgatgtcatagtgttgcctttttgtnnnnnnnnnnnnnggccccccgatttgggaggccttattgttcgtcttcgcattctgtttcacacgacgaaacgcctccctttcaggggaagataaaaaagaatgcgaagaaaaacggtgtgtgtttcatgtttgtttccttaagtgactttagtacagtacccgtactgttttcacgctgtcaacaaaaaacgcgcccgaaggcgcgttggcgatacactcaatataaaggactactcttcttcaacttcttcgacgaagttggcgtctttcaccgatgttgcggcacgacgtgcttcgcctttgtgctgcagtttattgagctgccgttccagcttgttgatcaattcgttaattgcggtgtacatatcttcatgtttaccactggcaaccagaacgccgttaggtgtattgattgtggcgtcagcaacaaacccttgtggctctttggacagaatgatatgtggattaatcagatgtgtttgccatttttccagtttggcgagacggtctgcgacatgttggcggatggccggagtaatttccatttgtttgctggtaatgttcattgtcataaattttacctcttgtcttcccgtcttggtgaattcagcataccgttcctgatgtcaaaatgtgtgatgaaaatctcataattttgtcactttttgtcaacgaatcttttttgtgagaaatcgcaggaagaggtgtttttttacttgaggaatatctcaaagcgagccatatttgatgagatcgatagcgactaaatcggttcagtttcacaactgacagaataaaaaaacggcagctcaagggctgccgttttgtgtttcaggtttctgttatgtattgctgctgtttgcggcgatgattttcgctactttttcagcttgcgcattcatctgcatctgacggtatgcattttccatcagcggcagcgcatcacgcgtagcctgggtatccgggtagtcgcgcaacatgccttctacgcggttaacgacggcaacccatgcgccacgttctgtatagtactcggccacggagtattcatatttcgccagacgatctttcaggaataccagacgtttggtggcatcggtggtgtactgactgttcggatagccgcgcaccagtttggaaaagtcactaaacgcagctcgtgcatgttgaggatcgcgatcgctacgatcgacgccaaagaacccttgcagcgcactgtcatccagcgccatattggtcaggccacgcatgtacatgacataatcgatattcggatgggtcgggttaaggcgaataaaacgatcgatggcagcctgtgctaacggcaaatcggcgtttttatagtaggcgtagatgagatccagctgcacctgctgcgaatacggaccaaacggatagcgattatctaacgcttccagttgcgttattgcctgtctccagttaccgtcctgcagcttttgttgtgcagtcgcgtaaatttcatttggcggattatcaggtacttcttcctttgaccccgagcaacccgccaaaaacaggcttagtgtggcggctgccaccagatatttcatgcgcgtcatgacgttttgactttcctcaaaatgtaatacgggagattctctgttcctgctcccggttaagaccagctacaatagcacactatattaaacggcaaagccgtaaaaccccaacgataaacgaagaagcagtatatatggcacaacgagtacagctcactgcaacggtgtccgaaaaccaactcggtcaacgcttagatcaggctttggccgaaatgttcccggattattcacgttcgcgaataaaagaatggatcctcgaccagcgagtgctggttaacggcaaagtttgtgataagccgaaagaaaaagtattgggtggcgagcaggttgccatcaacgctgagattgaagaagaagcgcgttttgaaccgcaggatatcccgctggatatcgtctatgaagatgaagacattattagcactaataaaccgcgcgacctggtggtacatcctggcgcgggtaacccggatggcacggtactgaatgcgttgcttcattactatccacccattgccgatgtaccgcgtgcgggcatcgtccatcgtctggataaagacaccactggcctgatggttgtggcaaaaaccgttccggctcagacgcgtttagtcgaatctttgcaacggcgtgaaattactcgtgagtatgaagcggtggcgattggtcatatgaccgcaggtggcacggtggacgagccaatcagtcgccacccgaccaaacgtacccatatggcggtgcatccgatgggcaaaccagcggtgactcactatcgcatcatggaacacttccgtgtgcacacgcgtctgcggttgcgtctggaaactggacgtacgcaccagatccgcgtgcatatggcccatatcactcatccgctggtgggcgatccggtttatggtggccgtccgcgtccgccaaaaggtgcttcggaagcatttatctccacgctgcgtaagtttgaccgccaggcgctacatgcaaccatgctgcgtctttatcacccgatctccggcatcgaaatggaatggcatgcgcctattccacaagatatggtggagctgattgaggtgatgcgcgccgatttcgaagaacataaggatgaagtggactggttatgagtaagctgattgtcccgcagtggccgctgccaaagggtgttgcggcttgtagctctactcgtatcggcggcgtgagcttgcccccgtatgactcgctcaacctcggtgcccattgtggcgataacccggatcacgttgaggagaatcgcaagcgactttttgctgcgggcaatttgccttctaaaccggtctggcttgagcaggtacacggcaaagatgtgcttaagcttactggcgaaccttatgcctcaaaacgagcagatgcctcttatagcaatacgcctggcacggtttgcgcagtgatgactgccgactgcctccctgtgctgttttgcaatcgagcgggaacggaagtcgccgccgctcatgctggctggcgtggactgtgcgcaggcgtgctggaagagacagtttcctgttttgctgataatccggaaaatattctcgcctggttagggccggcaattggtccacgcgcgttcgaagtgggggcggaggttcgcgaggcgtttatggcagcagacgccaaagcgagtacagctttcattcagcatggtgataagtatctggcggatatttatctgcttgcccggcagcgtctggcgagcgttggtgttgaacaaattttcggcggcgaccgttgtacatatacggaaaatgagactttcttctcttatcgtcgcgacaagaccaccgggcgtatggcaagtttcatttggctgatataacctaaagaatcaagacgatccggtacgcgtgattttcttttcacattaatctggtcaataaccttgaataattgagggatgacctcatttaatctccagtagcaactttgatccgttatgggaggagttatgcgtctggatcgtcttactaataaattccagcttgctcttgccgatgcccaatcacttgcactcgggcacgacaaccaattcatcgaaccacttcatttaatgagcgccctgctgaatcaggaagggggttcggttagtcctttgttaacatcagctggcataaatgctggccagttgcgcacagatatcaatcaggcattaaatcgtttaccgcaggttgaaggtactggtggtgatgtccagccatcacaggatctggtgcgcgttcttaatctttgcgacaagctggcgcaaaaacgtggtgataactttatctcgtcagaactgttcgttctggcggcacttgagtctcgcggcacgctggccgacatcctgaaagcagcaggggcgaccaccgccaacattactcaagcgattgaacaaatgcgtggaggtgaaagcgtgaacgatcaaggtgctgaagaccaacgtcaggctttgaaaaaatataccatcgaccttaccgaacgagccgaacagggcaaactcgatccggtgattggtcgtgatgaagaaatnnnnnnnnnnccattcaggtgctgcaacgtcgtactaaaaataacccggtactgattggtgaacccggcgtcggtaaaactgccatcgttgaaggtctggcgcagcgtattatcaacggcgaagtgccggaaggattgaaaggccgccgcgtactggcgctggatatgggcgcgctggtggctggggcgaaatatcgcggtgagtttgaagaacgtttaaaaggcgtgcttaacgatcttgccaaacaggaaggcaacgtcatcctgtttatcgacgaattacataccatggtcggcgcgggtaaagccgatggcgcaatggacgccggaaacatgctgaaaccggcgctggcgcgtggtgaattgcactgcgtaggtgccacgacgcttgacgaatatcgccagtacatcgaaaaagatgctgcgctggaacgtcgtttccagaaagtgtttgttgccgagccttctgttgaagataccattgcgattctgcgtggcctgaaagaacgttacgaattgcaccaccatgtgcaaattactgacccggcaattgttgcagcggcgacgttgtctcatcgctacattgctgaccgtcagctgccggataaagccatcgacctgatcgatgaagcagcatccagcattcgtatgcagattgactcaaaaccagaagaactcgaccgactcgatcgtcgtatcatccagctcaaactggaacaacaggcgttaatgaaagagtctgatgaagccagtaaaaaacgcctggatatgctcaacgaagaactgagcgacaaagaacgtcagtactccgagttagaagaagagtggaaagcagagaaggcatcgctttctggtacgcagaccattaaagcggaactggaacaggcgaaaatcgctattgaacaggctcgccgtgtgggggacctggcgcggatgtctgaactgcaatacggcaaaatcccggaactggaaaagcaactggaagccgcaacgcagctcgaaggcaaaactatgcgtctgttgcgtaataaagtgaccgacgccgaaattgctgaagtgctggcgcgttggacggggattccggtttctcgcatgatggaaagcgagcgcgaaaaactgctgcgtatggagcaagaactgcaccatcgcgtcattggtcagaacgaagcggttgatgcggtatctaacgctattcgccgtagccgtgcggggttggcggatccaaatcgcccgattggttcattcctgttcctcggcccaacgggtgtggggaaaacagagctttgtaaggcgctggcgaactttatgtttgatagcgacgaggcgatggtccgtatagatatgtccgagtttatggagaaacactcggtgtctcgtttggttggtgcgcctccgggatatgtcggttatgaagaaggtggctacctgaccgaagcggtgcgtcgtcgtccgtattccgtcatcctgctggatgaagtggaaaaagcgcatccggatgtcttcaacattctgttgcaggtactggatgatgggcgtctgactgacgggcaggggagaacggtcgacttccgtaatacggtcgtcattatgacctctaacctcggttccgatctgattcaggaacgcttcggtgaactggattatgcgcacatgaaagagctggtgctcggtgtggttagccataacttccgtccggaattcattaaccgtatcgatgaagtggtggtcttccatccgctgggtgaacagcacattgcgtcgattgcgcagattcagttgaaacgtctgtataaacgtctggaagaacgtggttatgaaatccacatttctgacgaggcgctgaaactgctgagcgagaacggttacgatccggtctatggtgcacgtcctctgaaacgtgcaattcagcagcagatcgaaaacccgctggcacagcaaatactgtctggtgaattggttccgggtaaagtgattcgcctggaagttaatgaagaccggattgtcgccgtccagtaaatgataaaacgagcccttcggggctcgtttttgtctataagttagacggaaaagactatatttaagatgttttgcctgaaaaatgagcgaacgataaagtttttatctttttcgcttgtcaggccggaataactccctataatgcgccaccactgacacggaacaacggcaaacacgccgccggggcagcggggttctcctgagaatctcaacagagaaaagcaaaaaaatgcttgactctgtagcgggaaagcgtattatgcacaccccgcgccgctgggaaaaagcgaagcggcactgctctttaacaatttatcagacaatctgtgtgggcactcgaagatacggattcttaacgtcgcaagacgaaaaatgaataccaagtctcaagagtgaa

SEQ ID NO: 214 - DNA, 26755 bp, Escherichia coli
  source 1..26755: mol_type = genomic DNA
ataaaaaaaacccccacatcatgtgggggaagacagggatggtgtctatggcaaggaaaacagggtttactactgggaacgtgagttgctactactcaatagcttcaacgatgaacttttttgccattgcgtcacgtcgcgcaactgctccattcgttgttgatgtttctcgtttaaaaccgcttgctgctccggcgttaacaggcgatacatttggttgcggacttttgccatctcaacctgacgagcaatttgctcattcgccattttttctgcctgtgcgcgcacagcgttttcatcaaaattttctgcggtgacaaggcgatgcattgtctccagttcgctaacattaacaggaggctgttcgtgccgggcctgttgcataagatctcgcatctgctgacgctgatgttcggttaaacttatgccgtcgaacatatggctctgcgtactgcgctgcgtaagttcttcacccggatgccagttatcgcctgaaccgacttcagcagcgtggcttaatgaactgactgccagcgttgaggccatgacggcagcggtaactatgcgcatcatttgctcccaaaatctttctgtcgcgattcaacgatagagagtttacgattcaggctgcaaacatgcgtcagggggtgtaaaacaacgtaaagtcatggattagcgacgtctgatgacgtaatttctgcctcggaggtatttaaacaatgaataaaatcctgttagttgatgatgaccgagagctgacttccctattaaaggagctgctcgagatggaaggcttcaacgtgattgttgcccacgatggggaacaggcgcttgatcttctggacgacagcattgatttacttttgcttgatgtaatgatgccgaagaaaaatggtatcgacacattaaaagcacttcgccagacacaccagacgcctgtcattatgttgacggcgcgcggcagcgaacttgatcgcgttctcggccttgagctgggcgcagatgactatctcccgaaaccgtttaatgatcgtgagctggtggcacgtattcgcgcgatcctgcgccgttcgcactggagcgagcaacagcaaaacaacgacaacggttcaccgacactggaagttgatgccttagtgctgaatccaggccgtcaggaagccagcttcgacgggcaaacgctggagttaaccggcactgagtttaccctgctctatttgctggcacagcatctgggtcaggtggtttcccgtgaacatttaagccaggaagtgctgggcaaacgcctgacgccttttgaccgcgctatcgatatgcacatttccaacctgcgtcgtaaactgccggatcgtaaagatggtcacccgtggtttaaaaccttgcgtggtcgcggctatctgatggtttctgcttcatgataggcagcttaaccgcgcgcatcttcgccatcttctggctgacgctggcgctggtgttgatgttggttttgatgttacccaagctcgattcacgccagatgaccgagcttctggatagcgaacagcgtcaggggctgatgattgagcagcatgttgaagcggaactggcgaacgatccgcccaacgatttaatgtggtggcggcgtctgtttcgggcgattgataagtgggcaccgccaggacagcgtttgttattggtgaccaccgaaggccgcgtgatcggcgctgaacgcagcgaaatgcagatcattcgtaactttattggtcaggccgataacgccgatcatccgcagaagaaaaagtatggccgcgtggaactggtcggtccgttctccgtgcgtgatggcgaagataattaccaactttatctgattcgtccggccagcagttctcaatccgatttcattaacttactgtttgaccgcccgttattactgctgattgtcaccatgttggtcagtacgccgctgctgttgtggttggcctggagtctggcaaaaccggcgcgtaagctgaaaannnnnnnnnngccgatgaagttgcccagggaaacttacgccagcacccggaactggaagcggggccacaggaattccttgccgcaggtgccagttttaaccagatggtcaccgcgctggagcgtatgatgacctcccagcagcgtctgctttctgatatctctcacgagctgcgcaccccactgacgcgtctgcaactgggtacggcgttactgcgccgtcgtagcggtgaaagcaaggaactggagcgtattgaaaccgaagcgcaacgtctggacagcatgatcaacgatctgttggtgatgtcacgtaatcagcaaaaaaacgcgctggttagcgaaaccatcaaagccaaccagttgtggagtgaagtgctggataacgcggcgttcgaagccgagcaaatgggcaagtcgttgacggttaacttcccgcctgggccgtggccgctgtacggcaacccaaacgccctggaaagtgcgctggaaaacattgttcgtaatgctctgcgttattcccatacgaagattgaagtgggctttgcggtagataaagacggtatcaccattacggtggacgacgatggtcctggcgttagcccggaagatcgcgaacagattttccgtccgttctatcggaccgatgaagcacgcgatcgtgaatctggcggtacaggtttggggctggcgattgttgaaaccgccattcagcagcatcgtggctgggtgaaggcagaagacagcccgctgggcggtttacggctggtgatttggttgccgctgtataagcggagttaaactccgcatttgtaggcaggataaggcgtttacgccgcatccggcatttgagcaggatgcctgatgcgacgctgatagcgccttatcaggcctacactccgggggttattttccccacaaccggcgggaaaaatcttcgatcttgccgctcagtcggcgcttttgcatcgtccgcgtccagcttttcgataacccggcggcggagagtaaacggtgatattgatcgtcatcaaacggcatatgccatgcgatggcggcagcctcctgcacggtcacatcgctgacacgggaaaccaactccagcggcgcgtccgcagacactttccctggcgctatcacgctatacaaccaccccactttacccgtgttttgcatcaactgcgctatatcgctgatatcaaaatggtaattgagtttatagcaaggcgagcgcggctggctgacctgaattaatgcctctttccagcggaaaatatcgcccatataaacattactttccgtgagaccgtcggttgagagattttcgccaaacgcaggcgcaacaaacaactccgcctgttccggaaattcccgcgcccagtagagatagtgctcacgaggataatgacacagcgctctgtctggcccgccgtgaacctttttctccgcctgctcgtcaccttccagccccagctccgtcagcatcaactcaccatcaacctggattttggcaattgcgctgggtttgccttcgggataagcctgaatcttgcctgtgtatacatcaaccggatatcgcatctgttccctctccacgagaaatttccccattagaccatatttattttatgtcaggcgtgctgttttcgcggtaagtatccaggcaggaactcaatagcaaaccggaagaacgttagttcatccggctgtggagattaagaaagcaggtttatttcaccgtacctaaaatttcgattttcgctgctctggctttgactttacgtgaccagatagaggtaagaattggcaccagaatcgaagtcacaatgaccgccgtcgctaccagcgaagttgctgccggagccatcggtttaaacgcaggcaccatttctgcaatcagcacaggtgtcgctaccgcggcccctgcggaactggaagcggcaattccggcagtgccatcgccaccgccaatcaatttatcggcgataatcaacggaataccggtcacgataattactgccacacccaacaggatccccagcaaaccagtctgggcaatcacagtcaaatcaatggtattgcccagcgcgaaggcaaagaatggaatcagcgtttgcaccgctttgctgaaaaattctcgtaattcagggtcaaggttccccagggcaaagcccaccaggaacggtaatactgcgccgacgaaaacatgcggttcaaacgaggcaatccctgcagtgcccagaataatcatcgtcatgagcggcccggactccaacgacatcaacacaaatgccccagcttcttctgttgtgccgtactgctgcatgatggaagcgtaaagtccgccattggtcatatccatcgccgccaccagcgccagcgttgaaagtccggcaaagaatccaacttcaacaccatgttccggaataatgcgcgaggcaattgccgcaaccacccacgcgacggcaatttttgttaccaccagcgtaccggatttacgcaataccgttcccgtcgcgcttaattttattgacgcccccatgcaaaaaaaccacaccgccagaatgggcaccgtaccggtaatcatcccgttggtgaatgatccaaaatatttccccgcccccggcgagaaggtgtggcacagtgcgccaaggaatagcgggacgagcatcatcccccccgggattttctcaatcgagcgttttatctgcatttccatcacctgtcggcatatttttaagggctgatgcgtcattcctcaatggagcatcagtgttgatggaaacgaagatagacattcatttaatcaataaaagtgatcaaaaccacatcaattgaaacactgttttatttttatcggatcattgtttttattttgaaattgatcacaaaaaaaccaccgccgttggcgatggttcattttttaagctgatatgcggcctatacgcctcattgcagcaggcggcaaatgattattttttcgccgcaaaacgtgccgctgcttcgtcccagttcaccacgttccagaactctttaatgtagtccggacggcggttctggaatttcaggtagtaagcatgttcccacacatccaggcccagaatcgggaagccggaagcgccagaaatagcttcacccatcagcggagaatcctggttagcagtagaaaccaccgccagtttatcgcctttcagcaccagccatgcccagccggaaccaaagcgggaagctgccgctttttcaaattctgctttgaagttatcaacggagccgaagtcacgttcgatagccgctttcaggtcaccctgcagggtggtgccttttttcagacctttccagaacaggctgtggttagcgtgaccgccagcgttgttgcgcagtacggttttcttgtctgctggcagctggtccagtttggtgatcagctcttcaaccggcaggttggcaaattctggcaggctttccagcgccgcgttggcgttgtttacgtaggtctgatggtgtttggtgtggtggatttccatggtctgcttatcgaagtgcggttccagggcatcgtaagcatacggcagggatggcagggtatagctcatattcatctccagtattgtcgggcggccgattgttaatgccgcgtaagcagttggttcattatagttaattaaatgatattgaaaatgattatcaatgccgtacttttcgtaagggtatggttttgcaggaaaatgcccgagatgtgaagcaaatcacccacttaatgccgtgattgccagtaaatcgacaacggcggcaacaggcgaaaggttaatcgacagcacgatttttacactcatctcgnnnnnnnnnngcgacgaaaaatgatgaggataagaagatgagtaacgcgattacgatggggatattttggcatttgatcggcgcggccagtgcagcctgtttttacgctccgttcaaaaaagtaaaaaaatggtcatgggaaaccatgtggtcagtcggtgggattgtttcgtggattattctgccgtgggccatcagcgccctgttactaccggatttctgggcgtattacagctcgtttagtctctctacgctgctgcctgtttttctgttcggcgctatgtgggggatcggtaatatcaactacggcctgaccatgcgttatctcggcatgtcgatgggaattggcatcgccattggcattacgttgattgtcggtacgctgatgacgccaattatcaacggcaatttcgatgtgctgattaacaccgaaggcggacgcatgacgttgctcggcgttctggtggcgctgattggcgtagggattgtaactcgagccgggcagttgaaagagcgcaagatgggcattaaagccgaagagttcaatctgaaaaaagggctggtgctggcggtgatgtgcggcattttctctgccggtatgtcttttgcgatgaacgccgcaaaaccgatgcatgaagccgctgccgcacttggcgtcgatccactgtatgtcgctctgccaagctatgtcatcatcatgggcggcggcgcgatcatcaacctcggtttctgcttcattcgtctggcaaaagtgaaggatttgtcgctaaaagccgacttctcgctggcaaaaccgctgatcattcacaatgtgttactctcagcactgggcgggttgatgtggtatctgcaattctttttctatgcctggggccacgcccgcattccggcgcagtatgactacatcagttggatgctgcatatgagtttctatgtattgtgcggcggtatcgtcgggctggtgctgaaagagtggaacaatgcaggtcgccgtccggtaacggtgttgagcctcggttgtgtggtgattattgtcgccgccaacatcgtcggcatcggcatggcgaattaatctttctgcgaattgagatgacgccactggctgggcgtcatcccggtttcccgggtaaacaccaccgaaaaatagttactatcttcaaagccacattcggtcgaaatatcactgattaacaggcggctatgctggagaagatattgcgcatgacacactctgacctgccgcagatattgattgatggtcattccagtctgctggcgaaattgctgacgcaaaacgcgctcactgcacgatgcctcatcacaaaatttatccagcgcaaagggacttttcaggctagccgccagccgggtaatcagcttatccagcaacgtttcgctggatgttggcggcaacgaatcactggtgtaacgatggcgattcagcaacatcaccaactgcccgaacagcaactcagccatttcgttagcaaacgacacatgctgactactttcatgctcaagctgaccgataacctgccgcgcctgcgccatccccacgctacctaagcgccagtgtggttgccctgcgctggcgctaaatcccggaatcgctccctgccagtcaagattcagcttcagccgctccgggcaataaataatattctgcaaaaccagatcgttaacggaagcgtaggagtgtttatcgtcagcatgaatgtaaaagagatcgccacgggtaatgcgataagggcgatcgttgagtacatgcagaccattaccgcgccagacaatcaccagctcacaaaaatcatgtgtatgttcggcaaaaacatcttgcggataacggtcagccacagcgactgcctgctggtcgctggcaaaaaaatcatctttgagaagttttaactgatgcgccaccgtggctacctcggccagagaacgaagttgattattcgcaatatggcgtacaaatacgttgagaagattcgcgttattgcagaaaaccatcccgtccctgacgaatatcacgcggtgaccagttaaactctcggcgaaaaagcgtcgaaaagtggttactgtcgctgaatccacagcgataggcgatatcagtaacgctggcctcgctgtggcgtagtagatgtcgggctttcatcagtcgcaggcggttcaggtaacgctgaggcgtcagtcccgtttgctgcttaagctgccgatgtagcgtacgcagcgaaagagaaaattgctccgccacggcatcccaattcacctcatcggcaaaatggtcctccagccaggccagaagcaagttgagacgtgatgcgctgttttccaggttctcctgcaaactgcttttacgcagcaagagcagtaattgcataaacaagatctcgcgactggcggtcgagggtaaatcattttccccttcctgctgttccatctgtgcaaccagctgtcgcacctgctgcaatacgctgtggttaacgcgccagtgggaaggatactgcccatccagctcttgtggcagcaactgattcagcccggcgagaaactgaaatcgatccggcgagcgatacagcacattagtcagacacagattatcggtatgttcatacagatgccgatcatggtcgcgcacaaaacagaccgtgccaccggtgatggtatagggctgcccattaaacacatgaatacccgtgccatgttcgacaatcacaatttcatgaaaatcatgatgatgttcaggaaaatccgcctgcgggagccggggttctatcgccacggacgcgttaccagacggaaaaaaatccacactatgtaatacggtcatactggcctcctgatgtcgtcaacacggcgaaatagtaatcacgaggtcaggttcttaccttaaattttcgacggaaaaccacgtaaaaaacgtcgatttttcaagatacagcgtgaattttcaggaaatgcggtgagcatcacatcaccacaattcagcaaattgtgaacatcatcacgttcatctttccctggttgccaatggcccattttcctgtcagtaacgagaaggtcgcgaattcaggcgctttttagactggtcgtaatgaaattcagcaggatcacattatgacctttcgcaattgtgtcgccgtcgatctcggcgcatccagtgggcgcgtgatgctggcgcgttacgagcgtgaatgccgcagcctgacgctgcgcgaaatccatcgttttaacaatgggctgcatagtcagaacggctatgtcacctgggatgtggatagcctggaaagtgccattcgccttggattaaacaaggtgtgcgaggaagggattcgtatcgatagcattgggattgatacctggggcgtggactttgtgctgctcgaccaacagggtcagcgtgtgggcctgcccgttgcttatcgcgatagccgcaccaatggcctgatggcgcaggcacaacaacaactcggcaaacgcgatatttatcaacgtagcggcatccagtttctgcccttcaatacgctttatcagttacgggcgctgacggagcaacaacctgaacttattccacacattgctcacgctctgctaatgccggattattttagttatcgccttaccggcaagatgaactgggagtacaccaacgccacaaccacgcaactggtcaatatcaatagcgacgactgggacgagtcgctactggcgtggagcggtgccaacaaagcctggtttggtcgcccgacgcatccgggtaatgtcataggtcactggatttgcccgcagggtaatgagcttccggtggtggacgttgccagccatgataccgccagcgcggttatcgcctcgccgttaaacggttcacgcgccgcttatctctcttctggtacctggtcattgatgggcttcgaaagccagacgccatttaccaatgacacggcgctggcagccaacatcaccaatgaaggcggggcggaaggtcgctatcgggtgctgaaaaatattatgggcttatggctgcttcagcgggtgcttaaggagcggaaaatcaacgatctcccggcgcttatcgtcgcgacacagtcacttccggcctgccgcttcatcatcaatcccaatgacgatcgctttattaatcctgaggcgatgtgcagcgaaattcaggctgcgtgtcgggaaacggcgcaaccgatcccggaaagtgatgctgaactggcgcgctgcattttcgacagtctggcgctgctgtatgccgatgtgttgcatgagctggcgcagctacgcggtgaagatttctcgcaactgcatattgtcggcggaggctgtcagaacacgctgctcaaccagctatgtgccgatgcctgcggtattcgggtgatcgccgggcctgttgaagcctcgacgctcggcaatatcggcatccagttaatgacgctggatgaactcaacaatgtggatgatttccgtcaggtcgtcagcaccaccgcgaatctgaccacctttacccctaatcctgacagtgaaattgcgcactacgtggcgcggattcactctacacgaaagacaaaggagctttgcgcatgaccactcaactggaacaggcctgggagctggcgaaacagcgtttcgcggcggtggggattgatgtcgaggaggcgctgcgccaacttgatcgtttacccgtttcaatgcactgctggcagggcgatgatgtttccggttttgaaaacccggaaggttcgctgaccggggggattcaggccacaggcaattatccgggcaaagcgcgtaatgccagtgagctacgtgccgatctggaacaggctatgcggctgattccggggccgaaacggcttaatttacatgccatctatctggaatcagatacgccagtctcgcgcgaccagatcaaaccagagcacttcaaaaactgggttgaatgggcgaaagccaatcagctcggtctggattttaacccctcctgcttttcgcatccgctaagcgccgatggctttacgctctcgcatcccgacgacagcattcgccagttctggattgatcactgcaaagccagccgtcgcgtttcggcctattttggcgagcaactcggcacaccatcggtgatgaacatctggatcccggatggtatgaaagatatcaccgttgaccgtctcgccccgcgtcagcgtctgctggcagctctggatgaggtgatcagcgagaagctggatccggcgcaccatatcgacgccgttgagagcaaattgtttggcattggcgcagagagctacacggttggctccaatgagttttacatggggtatgccaccagccgccagactgcgctatgcctggacgccgggcacttccacccgactgaagtgatttccgacaagatttccgccgccatgctgtatgtgccgcagttgctgctgcacgtcagccgtccggttcgctgggacagcgatcacgtagtgctgctggatgatgaaacccaggcaattgccagtgagattgtgcgtcacgatctgtttgaccgggtgcatatcggccttgacttcttcgatgcctctatcaaccgcattgccgcgtgggtcattggtacacgcaatatgaaaaaagccctgctgcgtgcgttgctggaacctaccgctgagctgcgcaagctggaagcggcgggcgattacactgcgcgtctggcactgctggaagagcagaaatcgttgccgtggcaggcggtctgggaaatgtattgccaacgtcacgatacgccagcaggtagcgaatggctggagagcgtgcgggcttatgagaaagcgattttgagccagcgtgggtaaacactgccggatgcggcgcgagcgccttatccggcctacgggtcgtgcatctgacaacaccgaatttacaggaacacagaacatgcaaaacattacccagtcctggtttgtccagggaatgatcaaagccaccaccgatgcctggctgaaaggctgggacgagcgcaacggcggcaacctgacgctgcgcctggatgacgccgatatcgcgctttatcacgacaacttccacccacaaccgcgctatattccgctcagccagcccatgcctttactggcaaatacgccgtttattgtcaccggctccggcaaattcttccgtaacgtccagcttgatcctgcagctaacttaggcgtcgtaaaagtcgacagcgacggcgcgggctaccatattctctgggggttaaccaacgaagccgttcccacttccgaacttccggctcacttcctttcccactgcgagcgcattaaagccaccaacggtaaagatcgggtgatcatgcactgccacgccaccaacctgatcgccctcacctatgtactggaaaacgacaccgcggtctttactcgccaactgtgggaaggcagcaccgagtgtctggtagtgttcccggatggcgttggcattttgccgtggatggtgcccggcacggacgaaatcggccaggcgaccgcacaagagatgcaaaaacattcgctggtgttgtggtccttccacggcgtcttcggcagcgggccgacgctggatgaaacattcggtttaatcgacaccgcagaaaaatcagcacaagtattagtgaaggtttattcgatgggcggcatgaaacagaccatcagccgtgaagagttgatagcgctcggcaagcgcttcggcgttacaccactagccagtgcgctggcgctgtaaggagcaaacatgatccgcaaagcctttgtcatgcaggttaaccccgacgcccacgaagagtatcagcgtcggcataaccccatctggccggaactggaagcagtgttgaaatctcacggtgcgcataactacgccatttacctcgacaaagcgcgtaatctgctgtttgccacggtagagattgaatctgaagaacggtggaatgcggtagccagtactgatgtttgccaacgttggtggaaatatatgaccgatgttatgcccgctaacccggataacagcccggtgagtagcgagctgcaagaagtgttttacctgccgtaattgcccaatgtgccggagatgcctccggcacaatattttaaatttcgatttgaaaaattaaacatattacatctcccggtaagttatatttccctgatacattgtgagtaaatcacaaaaataatgaataacccattaatgattcatgtggtttatttaaataaccattatgtgcattactccgcaaatctgacctttcactctgtctcaaattgtcattgtttaccgacatatcgcctctcatcacttaatcgctccaccattacaattgattaaaatatattttatggagtccgattaatggcagctcttactgcaagctgtattgacctgaatattcagggcaatggcgcttattccgttctgaagcagttggcgacaatagcgttacaaaacggttttatcaccgactcacaccagttcctgcaaaccctgctgctgcgcgaaaaaatgcactctactggatttggttccggtgtcgccgtgccgcacggtaaaagcgcctgcgttaaacaaccgttcgtattattcgcccgcaaagcgcaggctattgactggaaagccagcgatggcgaagacgtcaattgctggatctgcctcggcgtgccgcaaagcggcgaagaggatcaggtcaaaatcatcggcacactgtgtcgcaaaattatccaccaggattttattcatcaactgcaacagggcgacgccgaccaggtgcttgccttgttaaatcaaaccctcagctcataaggaagtggcgatggagtcatccttacgtattgtcgcgatcaccaactgccccgccgggatcgctcacacctacatggtggcggaagccctggaacagaaagcccgttctctcggccataccataaaagtggaaactcaagggtccagtggcgttgaaaaccgcttatccagcgaagagattgccgctgccgattacgtcattctcgctaccgggcgtggcctgagcggtgatgatcgcgcgcggtttgccgggaagaaagtttatgagattgccatctcccaggcgttgaaaaatatcgaccagattttcagcgaattaccgacaaactcgcagctttttgccgcagatagcggcgtgaagcttggcaaacaggaagtgcaaagcggcagcgtgatgagccacctgatggcgggcgtctctgcggcgctgccgtttgtcatcggcggtggtatcctggtggcgcttgccaacatgctggtgcagttcggtttgccgtataccgatatgtcgaaaggcgcgccgtcgtttaccttggtagttgaatccatcggttaccttggcttcacctttatgatccccatcatgggcgcttatattgcctcgtcgattgccgataaaccggctttcgctccggcgtttctggtttgctatctggcgaacgacaaagcgctgctcggcacccagtcgggtgcgggattcctcggcgcggtggtgctggggctggcgattggctatttcgtcttctggttccgcaaagtgcgccttggcaaagcattacaaccgctgctcggttcaatgctgatcccgttcgttactctgctggttttcggcgtgctcacttactacgttatcgggccggtgatgtccgacctcatgggcgggctgctccacttcctgaataccattcctccatcaatgaagtttgcggcagcgtttctggtcggtgcgatgctggcgttcgatatgggcggccccatcaataaaaccgcctggttcttctgcttctcactgctggaaaaacacatttatgactggtacgccatcgtcggcgttgtcgcgttgatgccgcccgttgcggcgggtcttgcgacgttcattgcgcccaaactgtttacccgacaggaaaaagaggctgccagtagtgccattgtggtcggtgccacagtcgcaaccgaaccggctataccttacgctctggcagctccgttgccgatgattaccgccaatacgctggcgggtggcattaccggcgtgctggtgatcgctttcggaatcaaacgtctggcacctggtttgggtatctttgacccgctgatcggcctgatgtcgccggtgggttcgttttatctggtgctggcgattggcctcgcgctgaacatttcattcattatcgtcctgaaaggattgtggttacgccgcaaagcgaaagccgcgcaacaggagcttgtccatgaacattgagttactgcaacagttgtgcgaagccagcgccgtcagcggcgatgaacaggaagttcgcgacattctgataaacacgctggaaccttgcgttaatgagatcacctttgatggtctgggcagctttgttgcccgtaagggggataaaggtccaaaagttgccgttgtcgggcatatggatgaagtcggctttatggtcacccacatcgacgagagcggttttctgcgtttcaccaccattggtggctggtggaatcagtcgatgctcaaccaccgggtaaccatacgcacacacaagggagtgaaaatccctggtgtgattggttccgtcgcgcctcatgcgttaacggaaaagcaaaggcaacagccgctgtcatttgatgagatgttcattgatattggcgcgaacagtcgcgatgaggtggaaaaacgcggtgtggcgatgggcgattttattagcccggaagccaattttgcctgctggggcgaagataaagtggtcggcaaggcgctggataaccgcatcggctgcgcaatgatggctgaactattgcatacggtgaataaacccgacatgacgctgtatggcgtcggaagcgtggaagaagaagttgggctacgcggggcacaaacctcggcggaacacattaaaccggatgtggtgattgtgctggataccgctgtcgcaggtgatgttccgggcattgataacattaaatacccgctgaaactgggccaggggccggggctgatgctgtttgacaagcgctacttccccaaccagaaactggtagcagcgtttaaaaactgtgccacgcagaatgatttaccgctgcaattttccaccatgaaaaccggagcgacggatggcgggcgctacaacgtgatgggcggcgggcgtccggttgtcgcgctgtgtctgccaactcgttatctgcacgccaacagcggtatgatttcaaaagccgattacgatgctctgctcacgctgatacggggttttctgacgaccttaactgcggagaaagtcaacgcgtttagccagttccgtcaggtggattaatgctaaacgaacgccagttaaagattgtcgatctgctggagcaacagccgcgcacgcctggcgagctggcgcaacagactggcgtttcaggcaggaccatcctgcgtgatattgactatctcaacttcacccttaacggcaaagcccgcattttcgccagtggcagtgcgggctatcagctggaaatcttcgagcgccgcagcttttttcagttgctgcaaaagcacgataacgacgatcggctgctggcgctgttattactgaatactttcactccccgtgcgcaactcgcctcggcgcttaatttgccagaaacgtgggtagcagagcgtctgccccggttaaaacagcgttatgaacgcacttgttgcctggccagccgccctggtttgggccatttcattgatgagacagaagagaaacgcgttatcttgctggcgaacttgctgcgcaaagatccgtttttaattccgctggcgggcataacacgagacaaccttcagcatttatccacggcctgcgacaaccaacaccgctggccgctcatgcagggtgattatctctccagcctgattctggcgatttacgccctgcgtaatcaactgaccgatgagtggccgcaatatcccggtgacgagataaaacaaatcgttgaacatagcggtctgtttcttggttataacgctgtaagaaccctgacgggtttgatagagaaacagcatcagcaagcgcaggtaatttcagccgatcatgtgctggggttgctgcaaagggtgccgggcatcgcgtcattgaatattattgatacgcagctggttgagaacattaccgggcatttattacgttgcctcgccgcaccagtgtggattgctgagcaccgccaaagcagcatgaataacctgaaagccgcctggcctgcggcctttgatatgagtctgcactttattacgctactgcgtgaacagctcgatattccccttttcgacagcgatctgatcggtttgtattttgcctgtgcgctggagcggcatcaaaacgaacgccagccgatcattttgctctcggaccagaacgcgattgccactattaatcagctcgccattgagcgcgatgttttaaattgtcgggtaattattgcccgtagcttaagcgaacttgttgccattcgcgaagagattgagccgttattgatcattaacaatagccattatttactggaagacgcggtaaataattacatcaccgtaaaaaatatcattacggctgccggtatcgaacaaataaaacattttctggcgacggcatttattcgccagcaaccggagcgttttttctctgcccccggaagttttcattattcgaatgtacgcggtgaaagctggcaacatattacccggcaaatttgtgcgcaattagtggcacaacaccatattaccgccgatgaagcacaacgcatcatcgcccgcgaaggcgaaggtgaaaacctgattgttaatcgcctcgccatcccacattgctggagcgaacaggagcgacgttttcgtggattttttattaccctcgcccacccgatcgaggtgaataacgaaatcattaaccatgtgttgattgcctgcgccgccgccgatgcgcgtcatgagctaaaagtatttagctatctggcaagcgtattgtgtcagcatccggcagaggttattgccgggttaacaggatatgaggcatttatggagttacttcacaaggggtgaactgtgtcggatgcgccgcatccgacactgcatttatcatcaaaaacgtttaacgcaggctattatagtcatcaaccatttcgttgtactcgcgtaatgctctcgggaaagagtcgtcgaccatccagcttgagtttgcgtcctgcagttgctctttatcccagtcagagtacgggactttatctctgacgcggcgaacgtattttttagcctcgagttgatactggcctgccgaattaataaacgagaaattcatgccgcctttatccgcttctttggcctgcgccaccagcgtttccagttcagacactttcttcattgccgcttctgcatcaaacttatcttgcgatatcaggttattaatttgtttcgctgaaatcatgactgccagagagtaatagtggaatgttttcccttctctttcttcaatatttttcagttccgcaagctggcgcttatcgttaatttcctgaatcgccgcatgataagattctgctacagcttcaaaggcttccagattttttaagaatgtctggtgcagcgttttccctttcgcaaacgcatcgtctttataattttcctgggtgtaatatttatccatttcgttaatggtattacccaacgccacggcagcatcgatataactcaccgccacgccatcaataggttgcagcgcaggcgttaacgccacagcactttttacgcctttttcacactcagcgaggttggattcactaatgccgtagatgccataaacagtacgctcttcaccggtaggcccctgtttaaaatctttcagccagtcagcataacgcgccagactgctctgtacagggatctgtaacttgttatagcacttgatatagacatccattttttcgtcgaaaaccgcttgttcatcgaccaccggttgcgcaggtgtttcaggtttagcttctgcttttgcaacgggagcttcaggagctggtgcggcaggttgactattggcaggcgggggcgtttctgtttcggcttttttatcatcacaacccgtcagaccgagggccatgatggcgactataatagcggaagataataaattccttttcatttaattgccttataaatatatagataagagagtgaacataataaatgaaaaaagaaaacgccactacacgcgttttatttataaataaaataataaaattcacgaaatgaataagtcctgcaatttaatatatatcgcaggacttattttaattaattgctcaaacgctgcggatgggtataaaccgttgcccgacccggcttacaaaaacccaccagcgtcagattacaacgctcagccacttctacagcaagcgtggtcgcggcagacaccgcaaacaaaatctctacgccgcacatcgccgacttttgcaccatttcataactggcacgactggaaaccagtaccgcaccttgctgccagctttccccttcttgtgaccggcggcctaacagtttgtccagcgccacatggcgacccacgtcttcatgcccgccgaccagttcgccagatggcaacatccaggcagcggcgtgagtacaaccagtcagttgccccactggctgaaaatcgttgagatgacgtaatgcatcatccagtttgttgagatcaaacgtctgggtgaacggtagcggctgcaccggttttccgatgtcattaagttgctccacgccgcatacgccacagcccgtacgtcccgccagcgcccggcggcgctccttcaaccccataaagcggcggctggaaagctcaatttgtacttcaagaccattacaggaaggaacgacatccatgccgaagatatcgcgcggactttctattatcccctcggaaagcgaaaaaccgagcgcaaagtactcaaggtctttgggcgacgccatcatcaccacatgcgaaatgccgttgtagaccagcgcaacgggaacttcttccgcgacctcatctaaccgtgggtgttgtaaatcatcacgccgccataactcaatttgacgaacacctgtgatatttgtcacattttcgatttcttttcgctgtgtttttttcactttctcttaaccggataagaacacacacaccaacattatggtattctgttacaaacccttcctggatggagggaaattgagccaattctggacctttgcggccccttccgcaaagaaaaataactcccactccctgcacacgcagcaagcgaatgtaaatgggacgtgacaatgtcgaaacaaggagcaatccatgcaggtcagcagaaggcagttctttaagatctgcgctggcggtatggcaggcaccacggcagcggcactgggttttgcacccagcgtagcgctcgcggaaacccggcagtataaactgctgcgcacccgcgaaacccgtaatacctgcacctattgttccgtaggctgtgggctgttgatgtacagcctcggtgacggagcaaaaaacgccaaagcatctatcttccatatcgaaggcgatccggatcacccggtcaaccgcggtgcactttgtccgaaaggcgctggcctggtggatttcatccactccgaaagccgtctgaagtttccggaataccgtgcgccaggttctgataaatggcagcaaatcagttgggaagaggcgtttgatcgcatcgccaaactgatgaaagaagaccgcgatgctaactacattgcgcaaaacgccgaaggcgtgactgttaaccgctggctctccaccgggatgctgtgtgcttccgcgtcgagtaacgaaaccggctatttaacgcaaaaattctcccgcgcgctgggtatgctcgcggtcgacaaccaggcgcgtgtctgacacggaccaacggtagcaagtcttgctccaacatttggtcgcggtgcgatgaccaaccactgggtcgacatcaagaacgccaacctcgtcgtggtgatgggcggtaacgccgctgaagctcacccggtcgggttccgctgggcgatggaagccaaaattcacaacggcgcgaagctgattgtgatcgatcctcgctttacgcgtacggcggcggtagctgactactatgcccctattcgttccggtactgacattgctttcctgtcaggcgtattgctgtacctgctgaacaatgaaaaattcaaccgcgaatacaccgaagcctataccaacgcaagcctgatagtgcgtgaggattacggctttgaagatggcctgttcaccggctacgacgcggaaaaacgcaagtacgataaatcctcctggacttatgaactggacgaaaacggcttcgccaaacgcgataccacgctgcaacatccgcgctgcgtgtggaacttgctgaaacagcacgtttcccgctacacgccagatgtggttgaaaacatctgtggtacgccaaaagacgcgttcctgaaagtctgcgaatacatcgcagaaaccagtgctcacgataaaactgcctcgttcctgtatgccctcggctggacgcaacactccgttggtgcgcaaaacattcgtacgatggcgatgatccagctgctgctcggcaatatggggatggccggcggcggcgttaacgccctgcgcggtcactccaatattcaggggctgacggacctggggctgctgtcgcagagtctgccaggttacatgacgctgccaagcgagaagcagaccgatctgcaaacctaccttaccgccaacacgccaaaaccgctgctggaaggccaggtaaactactggggcaactacccgaaattcttcgtctctatgatgaaggccttctttggtgataaagcgacggcggaaaatagctggggctttgactggttgccgaagtgggataaaggctacgacgtcctgcaatacttcgagatgatgaaagagggcaaggtcaatggctatatctgccagggctttaaccctgttgcctcattcccgaacaaaaacaaagtgatcggttgtctgtcgaaactgaagttcctcgtcaccatcgacccactgaacactgaaacctctaacttctggcagaaccacggtgagctgaacgaagttgactcgtcgaagatccagaccgaagtgttccgtctgccatcgacctgcttcgcagaagagaacggttcaatcgttaactcaggtcgctggttgcagtggcactggaaaggtgcggacgccccggggattgcgctgactgacggtgagatcctctccggtatcttcctgcgcttgcgcaagatgtatgccgaacagggtggcgcgaacccggatcaggtgctgaacatgacctggaactacgccattccgcatgagccgaagtcggaagaagtagcgatggagagcaacggtaaggcgctggccgatattaccgatccggcaaccggtgcggttatcgtcaagaaaggccaacaacttagctcgttcgcccaattgcgcgatgacggtacaacctcctgtggctgctggattttcgccggtagctggacgccggaaggcaaccagatggcgcgtcgtgataacgccgatccgtctggcctcggtaacacgctgggctgggcatgggcatggccgcttaaccgccgcattctgtataaccgcgcctccgcagatccgcagggtaacccgtgggatccgaagcgtcagttgctgaaatgggacggcactaagtggaccggctgggatattccggactacagcgcagcgcctccgggtagcggcgtcgggccgtttatcatgcagcaggaaggcatggggcgtctgtttgccctcgataagatggcggaaggtccgttcccggaacactacgagccgtttgaaacgccgctgggaactaacccgctgcatccaaacgttatctcgaacccggctgcacgtatctttaaagacgacgccgaagcattgggtaaagccgataagttcccgtatgtcggaaccacctatcgtctgaccgagcacttccactactggaccaaacacgcgctgttgaacgcgattttgcagccagagcagtttgtggaaatcggtgagtcgctggcgaataaacttggcattgcccagggcgataccgtgaaagtctcctccaaccgtggctatatcaaagccaaagcggtggtgaccaaacgtattcgcacgctgaaagcgaacagcaaagatatcgataccatcggtattccgattcactggggctatgaaggcgtagctaaaaaaggctttattgccaatacgttaacgccattcgttggtgatgcgaacacgcagacgccggagtttaagtccttccttgtgaatgtggaaaaggtgtaacggagacgacatatggcttatcaatctcaagatatcattcgtcgttccgcgactaacggtctgacccccgcgcctcaagcgcgggacttccaggaagaagtggcgaaactcatcgacgtcaccacctgtatcggctgtaaagcctgtcaggtggcgtgttcagagtggaacgacattcgcgataccgtcggcaataacgttggggtgtacgacaaccccaatgatttaagcgccaaatcgtggacggtaatgcgcttctcggaagtggagcagaacgacaaactggaatggctgatccgcaaagacggctgtatgcactgttccgatccaggctgcctgaaagcgtgcccggcggaaggtgcaattattcagtatgccaacggtatcgtcgacttccagtccgagcagtgcattggctgcggttattgcattgcgggctgtccgttcgacattccgcgcctcaacccggaagacaaccgcgtctacaaatgtacgctgtgcgttgaccgcgtggtggttgggcaagaaccagcctgcgtgaagacctgcccaacgggcgcgattcacttcggtacgaaagagtcgatgaaaacgctggcgagcgagcgcgttgctgagctgaaaacccgcggttacgacaatgcgggtctgtacgatccggcaggcgtcggtggtacacacgtcatgtacgtgctgcaccatgctgacaagccaaatctgtatcatggcttgccggagaacccggaaatcagcgaaaccgtgaaattctggaaaggcatctggaaaccgctcgcggctgttggctttgcggctacctttgcggccagtatcttccactacgtgggtgtcggtccgaaccgtgcggatgaggaagagaataatctgcacgaagagaaagacgaggagcgcaaatgaaacgacgtgacaccatcgtgcgctacaccgcgccggaacgtatcaaccactggatcaccgccttctgcnnnnnnnnnnctttttgttcccgtccttcaactggttgatgcaaatcatgggcacaccgcagctggcgcgaattctgcacccgtttgtcggcgtggttatgtttgcctcgttcatcatcatgtttttccgttactggcatcacaacctaatcaatcgggatgatatcttttgggcgaagaatattcgtaagatcgtcgtcaacgaggaagtaggtgacaccgggcgttataacttcggtcagaaatgcgttttctgggcggcgattattttcctggttctgctgctggtgagcggcgtgattatctggcgtccttattttgcgcctgctttctcaatcccggtgatccgattcgcgttaatgctgcattcatttgccgcagtggcgttaattgtggttatcatggtgcatatctacgccgccctttgggtgaaaggcacgattaccgccatggtggaaggatgggttaccagcgcctgggcgaagaaacatcacccgcgctggtaccgtgaggtccgcaagacaacggaaaagaaagctgaatgagtattcgcataatcccgcaagatgagctgggttcaagcgagaaacgtacggcggatatgattccgccgttattgttccctcggctcaagaatttatacaaccgccgcgccgagcgtctgcgcgagctggcagaaaataatcctctgggtgattacctgcgctttgctgcgcttatcgcccacgcccaggaagtggtgctgtacgaccatccgctggagatggatctgactgcgcgcattaaagaagccagcgcacaaggcaagcccccgctggatattcacgttctgccgcgtgataagcactggcaaaagctgctgatggcgctgattgctgagctgaaacctgaaatgagcggcccggcgctggcagtgattgagaatctggagaaggcatcgactcaggagctggaagatatggccagcgcgctgtttgcctctgatttctcgtccgtcagcagcgataaagcgccgtttatctgggctgcactgtcgctctactgggcgcagatggccaatctgatccccggcaaagcccgcgctgaatacggcgagcaacgtcaatattgcccggtttgtggttctatgccggtgtccagcatggtgcaaattggcaccactcaggggctacgttacctgcactgcaacctgtgtgaaactgaatggcacgtagtgcgcgtaaaatgcagcaactgcgagcagagcggcaaactgcattactggtcgctggatgacgaacaggccgcgattaaagccgaaagctgcgatgactgcggcacttacctgaaaattctctatcaggaaaaagatccaaaaatcgaagccgtagcagatgacctcgcctctctggtactggacgcacgaatggagcaagaaggctatgcccgcagttccatcaacccgttcctgtttccgggtgaaggagagtaatctctgacgttttccgggtggcgcaggtcgcccggattacagctcatagggtgtgacgacaccatctctcgtattccgcgttaccacctcaagctatgccgccagtgccggtttggcctcaatttacccaccaccacatcaataaggttatgggcatgagactgatgacaagcgtaagattgcctgatgcgctgcgcttatcaggcctaccaataaactgcaatacattgaatttatacgactttgtaggccggataaggcgttcacgccgcatccggcatgaacaacgcgcacgttgtcagcaatctgattgacatcattttttcccattaccattcctcgcgcagcttacgctgatattcgacaccatcttcctcacacccttgccagatgccaggaacactggttcttgctgtttgcgattgatttatcaggtattgatctaccgcttcccttaataggtccgcacgaggaagattacgctgcacctcgagatcatcaagttgcttaatcacctcattcgataaatcgagtaaaattctgcccatatctatacctgccagagagttcataaatatctcgccaatatcatttttgaatctatggagagaaaagtacccttgccgaatctttaaagaaagctcatttacgcatcattttttatttttgcgaggcgttttccagatatgatgtaacagttgcagttattataagttcaagtaaaacagccttgtattaataccagaataagggcatctgttttttatattcaagaatgaaaaatttttgtcattccttatgctccttacactgatcatcaacaccaactacctcccccttttgcctgcctccctttgctttacgcaccgggaattgctgacgttccagatattgctctaccgcttcgcgtaaaattgcagatcgtgaaaccttacgccagccccgaagcttgttcagccgtttaattgcctcttctgataaatgaagaaaaaccgtattcatcgccattaccaccaccttacctatattactcattaatgtatgtgcgaaaattacgccggaaa

SEQ ID NO: 215 - DNA, 26638 bp, Escherichia coli
  source 1..26638: mol_type = genomic DNA
aatacatacattatttttatgattaaggataatcaataattaaaacaggaagttctatgtctacgagaagagaagttattctttcctggttgtgtgagaaacgtcaaacctggcgtctatgctatttgttgggtgaggctggaagtggaaaaacctggctggcgcagcaactgcaaaaagataaacatcgccgtgtgattactttaagcctcgttgtttcctggcaaggtaaggccgcatggatcgttaccgacgataacgcggctgaacagggctgccgtgacagcgcctggacgcgagatgagatggcggggcaattactgcatgcgcttcatcgaactgatagtcgctgccctcttattattattgaaaatgctcacctgaatcaccgccgcatacttgatgatctccaacgcgcaatatctcttattcctgacggtcaatttttgctgatcggcagacccgatcgaaaagtcgaacgtgattttaaaaaacagggcattgaacttgtctcgataggacgtctgacggagcacgaacttaaggcaagcatccttgaaggtcagaatattgaccaacccgatctccttttaaccgccagagttctgaaacggatagctttattatgtcggggcgatcgcagaaagctggcgcttgccggcgaaacaattcgcttattacagcaagccgagcagaccagcgttttcacagcaaaacaatggcgaatgatttaccgcatattgggtgataaccgcccccggaaaatgcagcttgccgtggtgatgagtggaaccattatcgctcttacctgtggttggctactgctgtcctcttttacagctacgttacccgttcctgcgtggctgatacccgtaacgccagtagttaaacaagatatgactaaggatattgctcatgtggtgatgcgcgatagtgaggcgctaagcgtgttatacggcgtatgggggtacgaggtcccagctgattcggcctggtgcgatcaggcagtaagagcggggctggcatgtaaaagtgggaatgcttctttacaaacattggtagatcagaatttgccctggatcgcatcgcttaaagtcggggacaaaaaattgcctgttgtggtcgttcgcgtcggtgaggctagcgttgatgtcctcgtaggtcagcaaacgtggacgctgacacataaatggtttgagtcggtatggacgggtgattatcttctgttgtggaaaatgtcgccggaaggggagagtaccattacgcgtgatagcagcgaggaagagattctctggctggaaacgatgttaaaccgcgcattgcatatttcgacagaaccttcggcggagtggcgtcccttgttggtagaaaaaataaagcaatttcaaaaaagccaccacttgaaaactgacggtgttgttggcttttcaacgttagtacatctctggcaggtggcaggggagagtgcctacttatatcgggatgaagcaaatatttccccggaaacaacagtgaaggggaaatgacatgtttgaattctatatcgccgcgcgtgagcagaaagaaacaggtcaccctggtatcttctcccgacaaaaacacagcaccataatatatgtaatttgtttattactgatttgcctgtggtttgcaggaatggtgctggttggtgggtatgccaggcagctatgggtgctttggatagtaaaagccgaagtcactgtagaggctgaaacgcccgcttttaaacaatcaacacaacactatttcttcaaaaaacagccactccccgtcgtcgaatccgtcgaggaggaagatgacccaggcgtcgcggttgagaatgccccctcttcttctgaagacgaagaaaatactgtggaagaaagcgacgagaaagccggtttaagagagcgtgtcaaaaatgcactgaacgaacttgagagataacccgaaggctgtttactttactagcaatacgcttgcgttcggtggttaagtatgtataatgcgcgggcttgtcgtagttgacagcaggttcaatctgaacctcagttagccgaatttggctacctaacaatgctcccaatcggggagctacgtaagaacggttacactctcccatcaatcgtaatgggtctgaggagtaatcattttcgtttataaaataattggagctctggtctcatgcagaaccaaagaatccgtatccgcctgaaagcgtttgatcatcgtctgatcgatcaagcaaccgcggaaatcgtcgagactgccaagcgcactggtgcgcaggtccgtggtccgatcccgctgccgacacgcaaagagcgcttcactgttctgatctccccgcacgtcaacaaagacgcgcgcgatcagtacgaaatccgtactcacttgcgtctggttgacatcgttgagccaaccgagaaaaccgttgatgctctgatgcgtctggatctggctgccggtgtagacgtgcagatcagcctgggttaatcaggtcattgagcgattgagaggttgaaacaatgattggtttagtcggtaaaaaagtgggtatgacccgtatcttcacagaagnnnnnnnnnnttctatcccagtaaccgtaatcgaagttgaagcaaaccgcgttactcaggttaaagacctggctaacgatggctaccgtgctattcaggtgaccaccggtgctaaaaaagctaaccgtgtgaccaagcctgaagctggccacttcgctaaagctggcgtagaagctggccgtggtctgtgggaattccgcctggctgaaggcgaagagttcactgtaggtcagagcattagcgttgaactgtttgctgacgttaaaaaagttgacgtaactggcacctctaaaggtaaaggtttcgcaggtaccgttaagcgctggaacttccgtacccaggacgctactcacggtaactccttgtctcaccgcgttccgggttctatcggtcagaaccagactccgggcaaagtgttcaaaggcaagaaaatggcaggtcagatgggtaacgaacgtgtaaccgttcagagccttgacgtagtacgcgttgacgctgagcgcaacctgctgctggttaaaggtgctgtcccgggtgcaaccggtagcgacctgatcgttaaaccagctgtgaaggcgtaaggagatagcaatggaattagtattgaaagacgcgcagagcgcgctgactgtttccgaaactaccttcggtcgtgatttcaacgaagcgctggttcaccaggttgttgttgcttatgcagctggtgctcgtcagggtactcgtgctcagaagactcgtgctgaagtaactggttccggtaaaaaaccgtggcgccagaaaggcaccggccgtgcgcgttctggttctatcaagagcccgatctggcgttctggtggcgtgacctttgctgctcgtccgcaggaccacagtcaaaaagttaacaagaagatgtaccgcggcgcgctgaaaagcatcctgtccgaactggtacgtcaggatcgtctgatcgttgtcgagaagttctctgtagaagcgccgaaaactaagctgctggcacagaaactgaaagacatggctctggaagatgtgctgatcatcaccggtgagctggacgaaaacctgttcctggctgcgcgcaacctgcacaaggttgacgtacgcgatgcaactggtatcgacccggttagcctgatcgccttcgacaaagtcgtaatgactgctgatgctgttaagcaagttgaggagatgctggcatgattcgtgaagaacgtctgctgaaggtgctgcgtgcaccgcacgtttctgaaaaagcgtctactgcgatggaaaaatccaacaccatcgtactcaaagttgctaaagacgcgaccaaagcagaaatcaaagctgctgtgcagaaactgtttgaagtcgaagtcgaagtcgttaacaccctggtagttaaagggaaagttaaacgtcacggacagcgtatcggtcgtcgtagcgactggaaaaaagcttacgtcaccctgaaagaaggccagaatctggacttcgttggcggcgctgagtaagtcggaggagtaatacaatggcagttgttaaatgtaaaccgacatctccgggtcgtcgccacgtagttaaagtggttaaccctgagctgcacaagggcaaaccttttgctccgtnnnnnnnnnncagcaaatccggtggtcgtaacaacaatggccgtatcaccactcgtcatatcggtggtggccacaagcaggcttaccgtattgttgacttcaaacgcaacaaagacggtatcccggcagttgttgaacgtcttgagtacgatccgaaccgttccgcgaacatcgcgctggttctgtacaaagacggtgaacgccgttacatcctggcccctaaaggcctgaaagctggcgaccagattcagtctggcgttgatgctgcaatcaaaccaggtaacaccctgccgatgcgcaacatcccggttggttctactgttcataacgtagaaatgaaaccaggtaaaggcggtcagctggcacgttccgctggtacttacgttcagatcgttgctcgtgatggtgcttatgtcaccctgcgtctgcgttctggtgaaatgcgtaaagtagaagcagactgccgtgcaactctgggcgaagttggcaatgctgagcatatgctgcgcgttctgggtaaagcaggtgctgcacgctggcgtggtgttcgtccgaccgttcgcggtaccgcgatgaacccggtagaccacccacatggtggtggtgaaggtcgtaactttggtaagcacccggtaactccgtggggcgttcagaccaaaggtaagaagacccgcagcaacaagcgtactgataaattcatcgtacgtcgccgtagcaaataattttagaggataagccatgccacgttctctcaagaaaggtccttttattgacctgcacttgctgaagaaggtagagaaagcggtggaaagcggagacaagaagcccctgcgcacttggtcccgtcgttcaacgatctttcctaacatgatcggtttgaccatcgctgtccataatggtcgtcagcacgttccggtatttgtaaccgacgaaatggtcggtcacaaactgggtgaattcgcaccgactcgtacttatcgcggccacgctgctgataaaaaagcgaagaagaaataaggtaggaggaagagatggaaactatcgctaaacatcgccatgctcgttcttctgctcagaaggttcgccttgttgctgacctgattcgcggtaagaaagtgtcgcaggctctggatattttgacctacaccaacaagaaagcggctgtactggtcaagaaagttctggaatctgccattgctaacgctgaacacaacgatggcgctgacattgacgatctgaaagttacgaaaattttcgtagacgaaggcccgagcatgaagcgcattatgccgcgtgcaaaaggtcgtgcagatcgcatcctgaagcgcaccagccacatcactgtggttgtgtccgatcgctgagactctggagactagcaatgggtcagaaagtacatcctaatggtattcgcctgggtattgtaaaaccatggaactctacctggtttgcgaacaccaaagaattcgctgacaacctggacagcgattttaaagtacgtcagtacctgactaaggaactggctaaagcgtccgtatctcgtatcgttatcgagcgtccggctaagagcatccgtgtaaccattcacactgctcgcccgggtatcgttatcggtaaaaaaggtgaagacgtagaaaaactgcgtaaggtcgtagcggacatcgctggcgttcctgcacagatcaacatcgccgaagttcgtaagcctgaactggacgcaaaactggttgctgacagcatcacttctcagctggaacgtcgcgttatgttccgtcgtgctatgaagcgtgctgtacagaacgcaatgcgtctgggcgctaaaggtattaaagttgaagttagcggccgtctgggcggcgcggaaatcgcacgtaccgaatggtaccgcgaaggtcgcgtaccgctgcacactctgcgtgctgacatcgactacaacacctctgaagcgcacaccacttacggtgtaatcggcgttaaagtgtggatcttcaaaggcgagatcctgggtggtatggctgctgttgaacaaccggaaaaaccggctgctcagcctaaaaagcagcagcgtaaaggccgtaaataaggagcgtcgctgatgttacaaccaaagcgtacaaaattccgtaaaatgcacaaaggccgtaaccgcggtctggcgcagggtacggatgttagcttcggcagcttcggtctgaaagctgttggccgtggtcgtctgactgcccgtcagatcgaagcagcacgtcgtgctatgacccgtgcagttaagcgtcaaggtaagatctggatccgtgtgttcccggacaaaccgatcactgaaaagccgctggcagtgcgtatgggtaaaggtaaaggtaacgtggagtattgggttgccttgattcagccgggtaaagtcctgtatgaaatggacggtgttccggaagagctggcccgtgaagcattcaagctggcagcagcgaaactgccgattaaaaccacctttgtaactaagacggtgatgtaatgaaagcaaaagagctgcgtgagaagagcgttgaagagctgaacaccgagctgctgaacctgctgcgtgagcagttcaacctgcgtatgcaggctgcaagtggccagctgcaacagtctcacctgttgaagcaagtgcgtcgcgatgtcgcacgcgttaagactttactgaacgagaaggcgggtgcgtaatgaccgataaaatccgtactctgcaaggtcgcgttgttagcgacaaaatggagaaatccattgttgttgctatcgaacgttttgtgaaacacccgatctacggtaaattcatcaagcgtacgaccaaactgcacgtacatgacgagaacaacgaatgcggtatcggtgacgtggttgaaatccgcgaatgccgtccgctgtccaagactaaatcctggacgctggttcgcgttgtagagaaagcggttctgtaatacagtacactctctcgatacgaataaacggctcagaaatgagccgtttattttttctacccatatccttgaagcggtgttataatgccgcgccctcgatatggggatttttaacgacctgattttcgggtctcagtagtagttgacattagcggagcactaaaatgatccaagaacagactatgctgaacgtcgccgacaactccggtgcacgtcgcgtaatgtgtatcaaggttctgggtggctcgcaccgtcgctacgcaggcgtaggcgacatcatcaagatcaccatcaaagaagcaattccgcgtggtaaggtcaaaaaaggtgatgtgctgaaggcggtagtggtgcgcaccaagaagggtgttcgtcgcccggacggttctgtcattcgcttcgatggtaatgcttgtgttcttctgaacaacaacagcgagcagcctatcggtacgcgtatttttgggccggtaactcgtgagcttcgtagtgagaagttcatgaaaattatctctctggcaccagaagtactctaaggagcgaatcatggcagcgaaaatccgtcgtgatgacgaagttatcgtgttaaccggtaaagataaaggtaaacgcggtaaagttaagaatgtcctgtcttccggcaaggtcattgttgaaggtatcaacctggttaagaaacatcagaagccggttccggccctgaaccaaccgggtggcatcgttgaaaaagaagccgctattcaggtttccaacgtagcaatcttcaatgcggcaaccggcaaggctgaccgtgtaggctttagattcgaagacggcaaaaaagtccgtttcttcaagtctaacagcgaaactatcaagtaatttggagtagtacgatggcgaaactgcatgattactacaaagacgaagtagttaaaaaactcatgactgagtttaactacaattctgtcatgcaagtccctcgggtcgagaagatcaccctgaacatgggtgttggtgaagcgatcgctgacaaaaaactgctggataacgcagcagcagacctggcagcaatctccggtcaaaaaccgctgatcaccaaagcacgcaaatctgttgcaggcttcaaaatccgtcagggctatccgatcggctgtaaagtaactctgcgtggcgaacgcatgtgggagttctttgagcgcctgatcactattgctgtacctcgtatccgtgacttccgtggcctgtccgctaagtctttcgacggtcgtggtaactacagcatgggtgtccgtgagcagatcatcttcccagaaatcgactacgataaagtcgaccgcgttcgtggtttggatattaccattaccactactgcgaaatctgacgaagaaggccgcgctctgctggctgcctttgacttcccgttccgcaagtaaggtagggttactaaatggctaagcaatcaatgaaagcacgcgaagtaaaacgcgtagctttagctgataaatacttcgcgaaacgcgctgaactgaaagcgatcatctctgatgtgaacgcttacgacgaagatcgttggaacgctgttctcaagctgcagactctgccgcgtgattccagcccgtctcgtcagcgtaaccgctgccgtcaaacaggtcgtccgcatggtttcctgcggaagttcgggttgagccgtattaaggtccgtgaagccgctatgcgcggtgaaatcccgggtctgaaaaaggctagctggtaattgtcaccaattgaatcacgggagtaaagacagatgagcatgcaagatccgatcgcggatatgctgacccgtatccgtaacggtcaggccgcgaacaaagctgcggtcaccatgccttcctccaagctgaaagtggcaatcgccaacgtgctgaaggaagaaggttttattgaagattttaaagttgaaggcgacaccaagcctgaactggaacttactctgaagtatttccagggcaaagctgttgtagaaagcattcagcgtgtcagccgcccaggtctgcgcatctataaacgtaaagatgagctgccgaaagttatggcgggtctgggtatcgcagttgtttctacctctaaaggtgttatgactgatcgtgcagcgcgccaggctggtcttggtggcgaaattatctgctacgtagcctaatcggaggaaaaaatgtctcgtgttgctaaagcaccggtcgttgttcctgccggcgttgacgtaaaaatcaacggtcaggttattacgatcaaaggtaaaaacggcgagctgactcgtactctcaacgatgctgttgaagttaaacatgcagataataccctgaccttcggtccgcgtgatggttacgcagacggttgggcacaggctggtaccgcgcgtgccctgctgaactcaatggttatcggtgttaccgaaggcttcactaagaagctgcagctggttggtgtaggttaccgtgcagcggttaaaggcaatgtgattaacctgtctctgggtttctctcatcctgttgaccatcagctgcctgcgggtatcactgctgaatgtccgactcagactgaaatcgtgctgaaaggcgctgataagcaggtgatcggccaggttgcagcggatctgcgcgcctaccgtcgtcctgagccttataaaggcaagggtgttcgttacgccgacgaagtcgtgcgtaccaaagaggctaagaagaagtaaggtaacactatggataagaaatctgctcgtatccgtcgtgcgacccgcgcacgccgcaagctccaggagctgggcgcaactcgcctggtggtacatcgtaccccgcgtcacatttacgcacaggtaattgcaccgaacggttctgaagttctggtagctgcttctactgtagaaaaagctatcgctgaacaactgaagtacaccggtaacaaagacgcggctgcagctgtgggtaaagctgtcgctgaacgcgctctggaaaaaggcatcaaagatgtatcctttgaccgttccgggttccaatatcatggtcgtgtccaggcactggcagatgctgcccgtgaagctggccttcagttctaaggtagaggtgtaagatggctcacatcgaaaaacaagctggcgaactgcaggaaaagctgatcgcggtaaaccgcgtatctaaaaccgttaaaggtggtcgtattttctccttcacagctctgactgtagttggcgatggtaacggtcgcgttggttttggttacggtaaagcgcgtgaagttccagcagcgatccagaaagcgatggaaaaagcccgtcgcaatatgattaacgtcgcgctgaataacggcactctgcaacaccctgttaaaggtgttcacacgggttctcgcgtattcatgcagccggcttccgaaggtaccggtatcatcgccggtggtgcaatgcgcgccgttctggaagtcgctggggttcataacgttctggctaaagcatatggttccaccaacccgatcaacgtggttcgtgcaactattgatggcctggaaaatatgaattctccagaaatggtcgctgccaagcgtggtaaatccgttgaagaaattctggggaaataaaccatggcaaagactattaaaattactcaaacccgcagtgcaatcggtcgtctgccgaaacacaaggcaacgctgcttggcctgggtctgcgtcgtattggtcacaccgtagagcgcgaggatactcctgctattcgcggtatgatcaacgcggtttccttcatggttaaagttgaggagtaagagatgcgtttaaatactctgtctccggccgaaggctccaaaaaggcgggtaaacgcctgggtcgtggtatcggttctggcctcggtaaaaccggtggtcgtggtcacaaaggtcagaaatctcgttctggcggtggcgtacgtcgcggtttcgagggtggtcagatgcctctgtaccgtcgtctgccgaaattcggcttcacttctcgtaaagcagcgattacagccgaagttcgtctgtctgacctggctaaagtagaaggcggtgttgtagacctgaacacgctgaaagcggctaacattatcggtatccagatcgagttcgcgaaagtgatcctggctggcgaagtaacgactccggtaactgttcgtggcctgcgtgttactaaaggcgctcgtgctgctatcgaagctgctggcggtaaaatcgaggaataagtagcagatggctaaacaaccgggattagattttcaaagtgccaaaggtggcttaggcgagctgaaacgcagactgctgtttgttatcggtgcgctgattgtgttccgtattggctcttttattccgatccctggtattgatgccgctgtacttgccaaactgcttgagcaacagcgaggcaccatcattgagatgtttaacatgttctctggtggtgctctcagccgtgcttctatctttgctctggggatcatgccgtatatttcggcgtcgatcattatccagctgctgacggtggttcacccaacgttggcagaaattaagaaagaaggggagtctggtcgtcgtaagatcagccagtacacccgttacggtactctggtgctggcaatattccagtcgatcggtattgctaccggtctgccgaatatgcctggtatgcaaggcctggtgattaacccaggctttgcattctacttcaccgctgttgtaagtctggtcacaggaacgatgttcctgatgtggttgggcgaacagattactgaacgaggtatcggcaacggtatttcaatcattatcttcgccggtattgtcgcgggactcccgccagccattgcccatactatcgagcaagcgcgtcaaggcgacctgcacttcctcgtgttgctgttggttgcagtattagtatttgcagtgacgttctttgttgtatttgttgagcgtggtcaacgccgcattgtggtaaactacgcgaaacgtcagcaaggtcgtcgtgtctatgctgcacagagcacacatttaccgctgaaagtgaatatggcgggggtaatcccggcaatcttcgcttccagtattattctgttcccggcgaccatcgcgtcatggttcgggggcggtactggttggaactggctgacaacaatttcgctgtatttgcagcctgggcaaccgctttatgtgttactctatgcgtctgcaatcatcttcttctgtttcttctacacggcgttggttttcaacccgcgtgaaacagcagataacctgaagaagtccggtgcatttgtaccaggaattcgtccgggagagcaaacggcgaagtatatcgataaagtaatgacccgcctgaccctggttggtgcgctgtatattacctttatctgcctgatcccggagttcatgcgtgatgcaatgaaagtaccgttctacttcggtgggacctcactgcttatcgttgttgtcgtgattatggactttatggctcaagtgcaaactctgatgatgtccagtcagtatgagtctgcattgaagaaggcgaacctgaaaggctacggccgataattggtcgcccgagaagttacggagagtaaaaatgaaagttcgtgcttccgtcaagaaattatgccgtaactgcaaaatcgttaagcgtgatggtgtcatccgtgtgatttgcagtgccgagccgaagcataaacagcgccaaggctgattttttcgcatatttttcttgcaaagttgggttgagctggctagattagccagccaatcttttgtatgtctgtgcgtttccatttgagtatcctgaaaacgggcttttcagcatggaacgtacatattaaatagtaggagtgcatagtggcccgtatagcaggcattaacattcctgatcataagcatgccgtaatcgcattaacttcgatttatggcgtcggcaagacccgttctaaagccatcctggctgcagcgggtatcgctgaagatgttaagatcagtgagctgtctgaaggacaaatcgacacgctgcgtgacgaagttgccaaatttgtcgttgaaggtgatctgcgccgtgaaatcagcatgagcatcaagcgcctgatggatcttggttgctatcgcggtttgcgtcatcgtcgtggtctcccggttcgcggtcagcgtaccaagaccaacgcacgtacccgtaagggtccgcgcaaaccgatcaagaaataatcggggtgattgaataatggcaaaggcaccaattcgtgcacgtaaacgtgtaagaaaacaagtctctgacggcgtggctcatatccatgcttctttcaacaacaccatcgtgactatcactgatcgtcagggtaacgcgttgggttgggcaacagccggtggttccggtttccgtggttctcgcaaatccactccgtttgcagctcaggttgcagcagagcgttgcgctgacgccgtgaaagaatacggcatcaagaatctggaagttatggttaaaggtccgggtccaggccgcgaatctactattcgtgctctgaacgccgcaggtttccgcatcactaacattactgatgtgactccgatccctcataacggttgtcgtccgccgaaaaaacgtcgcgtataacgcctcgttttccaggtttgttggagaaagaaaatggcaagatatttgggtcctaagctcaagctgagccgtcgtgagggcaccgacttattccttaagtctggcgttcgcgcgatcgataccaagtgtaaaattgaacaagctcctggccagcacggtgcgcgtaaaccgcgtctgtctgactatggtgtgcagttgcgtgaaaagcaaaaagttcgccgtatctatggtgtgctggagcgtcagttccgtaactactacaaagaagcagcacgtctgaaaggcaacaccggtgaaaacctgttggctctgctggaaggtcgtctggacaacgttgtataccgtatgggcttcggtgccactcgtgcagaagcacgtcagctggttagccataaagcaattatggtaaacggtcgtgttgttaacatcgcttcttatcaggttagtccgaatgacgttgtaagcattcgtgagaaagcgaagaagcagtctcgcgtgaaagccgctctggagctggctgagcagcgtgaaaagccaacctggctggaagttgatgctggcaagatggaaggtacgtttaagcgtaagccggagcgttctgatctgtctgcggacattaacgaacacctgatcgtcgagctttactccaagtaaagcttagtaccaaagagaggacacaatgcagggttctgtgacagagtttctaaaaccgcgcctggttgatatcgagcaagtgagttcgacgcacgccaaggtgacccttgagcctttagagcgtggctttggccatactctgggtaacgcactgcgccgtatgctgctctcagcgatgccgggttgcgcggtgaccgaggttgagattgatggtgtactacatgagtacagcaccaaagaaggcgttcaggaagatatcctggaaatcctgctcaacctgaaagggctggcggtgagagttcagggcaaagatgaagttattcttaccttgaataaatctggcattggccctgtgactgcagccgatatcacccacgacggtgatgtcgaaatcgtcaagccgcagcacgtgatctgccacctgaccgatgagaacgcgtctattagcatgcgtatcaaagttcagcgcggtcgtggttatgtgccggcttctacccgaattcattcggaagaagatgagcgcccaatcggccgtctgctggtcgacgcatgctacagccctgtggagcgtattgcctacaatgttgaagcagcgcgtgtagaacagcgtaccgacctggacaagctggtcatcgaaatggaaaccaacggcacaatcgatcctgaagaggcgattcgtcgtgcggcaaccattctggctgaacaactggaagctttcgttgacttacgtgatgtacgtcagcctgaagtgaaagaagagaaaccagagttcgatccgatcctgctgcgccctgttgacgatctggaattgactgtccgctctgctaactgccttaaagcagaagctatccactatatcggtgatctggtacagcgtaccgaggttgagctccttaaaacgcctaaccttggtaaaaaatctcttactgagattaaagacgtgctggcttcccgtggactgtctctgggcatgcgcctggaaaactggccaccggcaagcatcgctgacgagtaaccggatcacaggttaaggttttactgagaaggataaggtcatgcgccatcgtaagagtggtcgtcaactgaaccgcaacagcagccatcgccaggctatgttccgcaatatggcaggttcactggttcgtcatgaaatcatcaagacgactctgcctaaagcgaaagagctgcgccgcgtagttgagccgctgattactcttgccaagactgatagcgttgctaatcgtcgtctggcattcgcccgtactcgtgataacgagatcgtggcaaaactgtttaacgaactgggcccgcgtttcgcgagccgtgccggtggttacactcgtattctgaagtgtggcttccgtgcaggcgacaacgcgccgatggcttacatcgagctggttgatcgttcagagaaagcagaagctgctgcagagtaatctgaagcaacgtaaaaaaacccgccccggcgggtttttttatacccgtagcatccccacttatctacaatagctgtactctttttgttcatcccctggagtatttatgtggttacttgaccagtgggcagagcgtcatatagcagaagcgcaagcgaaaggtgagtttgataacctggcaggtagcggcgaaccattgatactggatgatgattctcacgtgccaccggaattacgtgcggggtatcgcttgctgaagaatgccggttgcttaccgccagaacttgagcaacggagagaagcaattcagcttctggatatcctgagaggtatccgtcacgatgatccgcaatatcaagaggttagccgtcgattgtcattactggaattgaagctgcgacaagctggattgagtaccgattttttacgcggcgattatgctgacaagttgttggacaaaatcaacgataactagtggagtatgtatgtatcgcattggtgagctggcaaaaatggcggaagtaacacctgacacgattcgttattacgaaaaacagcagatgatggagcatgaagtgcgtactgaaggcgggtttcgcctgtataccgaaagcgatctccagcgattgaaatttatccgccatgccagacaactaggtttcagtctggagtcgatccgcgagttgctgtcgatccgcatcgatcctgaacaccatacctgtcaggagtcaaaaggcattgtgcaggaaagattgcaggaagtcgaagcacggatagccgagttgcagagtatgcagcgttccttgcaacgccttaacgatgcctgttgtgggaccgcccatagcagtgtttattgttcgattcttgaagctcttgaacaaggggcgagtggcgttaagagtggctgttgattttttgcactggcaggattacactcgcgccgtaaaataaccaattggagtttttatgagccgatatcagcatactaaagggcagataaaggataatgcgatagaagcattactacatgatcccttattccgacagcgcgtagagaaaaataagaaggggaaaggcagttacatgcgaaaaggaaaacatggcaatcgggggaactgggaggccagtggcaagaaagtaaatcacttttttaccactggccttctgctttcaggcgtttgttaagagcggttattctgctctttcagcaaatcacgaatttctgtcagtaatacttcttctttagttggtgctggtgcggctgctggttcttcttttttccgattcagtttgttgattagcttaatcgccataaagatggcaaaggccacaatcagaaaatcaaagacgttttgaatgaagacaccgtaatgcatcacaacagcagggatatccccctgcgcatcgcgtagcgtgacagcaaactgtttaaagtcgatcccgccaattaataagcccagaggtggcatgatgatatcggcaaccagtgaagatacaatcttcccgaatgccgcaccgataatgacacccaccgccaaatccaccacgttcccgcgcatcgcaaattcgcgaaattctttaataatgctcatgttattctccctatgaagccgacaaccataagtctaacaaatgttaagccattttcctgccaggaatgaatttaattaatccttgataatcaaagggaattaataaggcgtcattagacgccttattaattacaagaagaaagggcttggctggaagagtctttcgacgtcggtaataaactttttatctgtgaggaacataattacgtgatcgccttgctcaatgcgcagattgtcattggcaatcatcacgtcgtttccacgtaccaccgctccaataatcgttcctggcggtagcttgatttcgtcaatgacnnnnnnnnnnaacgcgtgaggtgctttcatcaccgtgagcaacggcttcaatagcttctgctacgccgcggcgcaatgaggaaacaccaacaatatctgcttttcgcacatggctaagcaacgcagaaatagttgcttgttgtggtgaaatcgcaatatcgatcacgctcccctgaaccagatccacataagcgcgacgctggatcaataccatcacctttttcgcacccatacgtttggcaagcatggcggacatgatattggcctcgtcatcgttggtgacggcaataaacagatcaacttgatcgatatgttcttcggccagcagttcttgatccgacgcatcaccaaaaaagacaatcgtattctgcaacttttccgccagttcggcagcgcgctgctgattacgttcgatgagtttaacgctgtaatctttttccagacgacgcgccagccctgcaccgatattaccgccaccaaccagcatgatccgcttatacggtttttccagtcgctgtaattcactcatcaccgcacggatatgctgtgaagcggcaataaagaacacttcatcaccagcttccacaatggtcgaaccttgtggacgaatggggcgatcgtggcggaaaattgctgccacacgagtatcgatatgtggcatatgttcgcgcatggtcgaaagtgcgttaccaatcagcgggccgccataataggctttaaccacagcgaggctgactttaccctcagcgaagttcaccacctgcaatgcgccgggatactcaatcagtcggtaaatattatcgataaccaactgctctggtgcgatcagatgatcaatcggtacagcatctgaatgaaatagcttatcggcatcgcgcacgtagtctggtgagcggatgcgagcgatgcgattaggggtgttgaaaagtgagtaggctacctggcaggcaaccatattggtttcatctgaactggttacagcaaccagcatatcggcgtcgtcggcacctgcctcccgcaatacgcgtggatgagagccatgcccctgcacgactcgcaggtcaaatttatcctgcaaggtccgcagacgctcaccgttggtatcgacaacagtgatatcgttgttctcgccaaccaggttttccgccagtgtgccgccaacctggccggcacccagaatgataattttcatcagtcgcgacccgttatctcatcactttttgattagcttagcgtaaaagaagccgtcgccctcttcggtaccaggcagattttgtttacccggttgctctggtgttcctgtttcgcaaagttcggcatcagcggtacgttgcaaaaaggctttaatctgcaggctattctcttccggtaacaccgaacaggtggcatagaccagggttccaccggattttaaatgcggccaaatggcgtcgagaatttcagactgcaattgcgcgagttccgggatatcgcgatcgcgacgtaaccatttaatatccggatggcgacgaatcacaccggttgctgaacaaggcgcatctaataaaatgcgatcaaactgttgctcgccacaccattgggaagggtagcggccatcaccttgtttcacggtcgctttcataccaaggcgttttaaattgtcgtaaacgcgagagaggcgctgttcgtcaatatcaaccgcaacaacctgcgcttctggtgccacctcaaggatatgcgttgttttaccgccgggggcggcacaaagatccagaatgtgttcaccgttttgtggcgcaagccaggtcatgcaaccttgtgctgatgcatcctgaacggtaacccatccgtcttcaaaaccaggtagcgcatgaacaggtgcaggtgtttccagccgtacagcatcagggtaatccgcatgcgggaaacctttcattcctgcttcatccaacaatgcaagccagctgtcgcgggaatgatgcgtacgattaacgcgcagccacattggcggacgctggttattggcttcgacgatggattgccactgctctggatacgctttttgcagacgcttcagcaaccaggaaggatgcagataacgtgcatcactggcattaaactcggctaataactcttcttgctgacgctggaactggcgtaatacaccgtttatcaaccctttaagttgcggacgcttaattgcgatagcgccttcaaccgtttcagccagcgcagcatgaggtggaatgcgggtataaagcagttgatacaaaccaaccataatcaggtaatgcacggtccgctgtttgccggtcatcggacgggccattaacttattaatcagccagtctaactgcgaaagcgtacgcagtacgccaaagcacaactcttgaagaagtgctttgtctttatcggaaactttttgctggagcggtggcagaatgttgcttaatgattgcccttgctcgacgacttgttcaacggcctgggccgccatgctacgtaaattacgttgttttttcataagtataaaaatgcccggcaagaccgggcttagaagagtggactatcagaccagacggttgcccggaacaaaccattcccgacgagagttcaggaggtcttgcgcgctcatcgctttcttacccgcaggttgtaacgagagcaggttcaggatgccatcaccagtcgcaacctgaatgccttgtttattggcttcaaggatcgttcctggtgcagcgttgtttgccgtatccatgaccgacgctttccagactttaaccggttgtccttcaatttccagccagctcattggccatgggttgaaagcgcgaatgcagcgttcaagctgcgctgccgaaagcgaccagtcaatacgcgcttcttctttactcaacttctcggcgtaagtgacaagagtttcgtcctgaacttctggtttcgccgtgccgtctgccagttgtttcaacgtggtgataagcccttgtgggccaagctctgccagcttgtcgtacagcgtaccactggtatcttctgcagtaatcgggcaggagagcttatagagcatatcaccggtgtctaaaccgacatccatttgcataatggtcacaccagtttctgcatcacccgcccatagtgagcgttggattggtgcagcaccgcgccagcgtggcagcagtgaaccatgaacgttgatacagccaagacgcggcatctccagcactgctttaggcagaattaagccataggcgacgacgaccataacatcagcctgcagatcggcgaccagttgctggttttcttgtggacgcagggaaacaggttgaaaaacgggcagacctttttcctcagccagaactttaaccgggctgggcatcagttttttaccgcgtcctgccggtcggtctggctgggtgaacacgccaacgacgttatgaccagaagacaacagcgcgtcgagatgacgcgctgcaaagtcaggtgtacccgcaaaaataatacgtagtgattctgacacgttagttcttatccttaagcccgggctttcagacgatccagtttttcaactttctgacgaatacgttgttgtttcaacggtgacagataatccataaacagtttgccgaccaggtgatccatctcatgctgaatacagatggctaacagaccgtctgcttccagttcaaatggtttaccgtcgcggtccagggcgcgaattttaactttctctgcgcgtggcactaaagcacgttgttcagggatcgacaggcaaccttcttcaatgcctgtttcgccgcttttttctaaaagctccggattgattaacaccagccgttcgtcacggttttccgaaacatcaataacaatgatacgttgatggatatcaacctgggttgccgccaggccaataccttcttctgcgtacatcgtctcgaacatatcatcgacgatacgctgaatttctgcattcacttcttctaccggtttagcaactttgcgaagccgctcgtccggaatatgtaacacttgcaaaactgacataaatctccagagatgtgttcaggagttagaaagattatttcttctattctagacaaatccccctctgattgacagcatcactgaccaatcgcaaagattgctaaggctgcttatggcagggagataaggatggtcgatacagatatttggctgcgtttaatgagcatcagcagcttgtacggcgatgatatggtccgtatagctcactggctggcaaaacagtcgcatattgatgcggttgtattgcagcaaacagggcttacattgcggcaggcacaacgctttctttcatttccgcgaaagagtatcgaaagctcactttgttggttggagcaacccaaccatcatttaatccctgcggacagcgaattttatcctcctcaacttctggtgacgacagattaccccggcgcactgtttgttgaaggagaactgcacgcgctgcattcatttcagcttgccgtagtggggagtcgggcgcattcatggtatggcgagcgatggggacggttattttgcgaaactctggcgacgcgtggagtgacaattacgagtggactggcgcgtggaatcgatggtgtggcgcataaagctgccttacaggtaaatggcgtcagcattgctgtattggggaatggacttaataccattcatccccgccgccatgcccgactggctgccagtctgcttgaacatggcggagctctcgtctcggaatttcccctcgatgttccaccccttgcttacaatttcccacgaagaaatcgcattatcagtggtctaagtaaaggtgtactggtggtggaagcggctttgcgcagtggttcgctggtgacagcacgttgtgcgcttgagcaggggcgtgaagtttttgccttgccaggtccaatagggaatccgggaagcgaagggcctcactggttaataaaacaaggtgcgattcttgtgacggaaccggaagaaattctggaaaacttgcaatttggattgcactggttgccagacgcccctgaaaattcattttattcaccagatcagcaagacgtggcattgccatttcctgagctcctggctaacgtaggagatgaggtaacacctgttgacgtcgtcgctgaacgtgccggccaacctgtgccagaggtagttactcaactactcgaactggagttagcaggatggatcgcagctgtacccggcggctatgtccgattgaggagggcatgccatgttcgacgtactaatgtatttgtttgaaacctatattcacacagaagctgagttgcgtgtggatcaagacaaacttgaacaggatcttaccgacgcaggatttgatcgagaagatatctacaatgccctgctttggctggaaaagcttgcggattatcaggaaggactggcagaaccgatgcaactggcctctgatccactctccatgcgtatttatacccctgaggagtgtgaaagactggatgccagctgtcgtggttttctgcttttccttgagcaaattcaggtgcttaaccttgaaacccgtgaaatggtgatagagcgagtgctcgcgctggataccgcagagttcgacctggaagacctgaaatgggtaatcctgatggtgttgttcaatattccgggctgcgaaaatgcgtaccagcaaatggaagaattactctttgaagtgaatgaaggtatgctgcattaatcatttctttaattcagcataagttgttatggcgaaatcagcactgttcacggtgcgtaataatgagtcctgcccaaagtgcggggctgaactggttattcgatccgggaaacacggtccgtttcttggatgctcacagtatccggcgtgtgactacgtccgtcctctgaaatcttcagcggatggacatattgtcaaagttctggaggggcaggtttgccttgcatgtggcgcaaatctggtattacgccagggacgctttggtatgtttattggttgcagtaactaccctgaatgcgaacataccgaacttatcgataaaccggacgaaacagcaattacatgcccccaatgccggacgggccatctggtccagcgccgctcccgttatggcaaaacatttcactcctgtgatcgctacccggagtgtcaatttgccattaacttcaaacccatagctggagaatgccctgagtgtcattatccactactcatcgaaaagaaaaccgcgcagggtgtaaaacacttttgtgccagtaaacaatgtggaaagccggtttcggcggaataataacgtgaataataacctgcaaggagacgctatcgcagctgcgatagatgtcctcaatgaagaacgtgtcatcgcctatccaacggaagccgttttcggtgttgggtgcgatcctgatagcgaaacagcagtgatgagactgttggagttaaaacagcgtccggttgataaggggctgattttaatcgcggcaaattacgagcagcttaaaccctatattgatgacaccatgctgactgatgcgcagcgtgaaaccattttttcccgctggccaggtcctgtcacctttgtctttcccgcgcctgcgacaacaccgcgctggttgacgggccgctttgattcgcttgctgtacgagtcaccgaccatccgttggtggttgctttgtgccaggcttatggtaaaccgctggtttctaccagtgccaacttgagtggattgccaccttgtcgaacagtagacgaagttcgcgcacaatttggcgcggcgttcccggttgtgcctggtgaaacgggggggcgtttaaatccttcagaaatccgcgatgccctgacgggtgaactgtttcgacaggggtaacataatggaaacctatgctgtttttggtaatccgatagcccacagcaaatcgccattcattcatcagcaatttgctcaacaactgaatattgaacatccctatgggcgcgtgttggcacccatcaatgatttcatcaacacactgaacgctttctttagtgctggtggtaaaggtgcgaatgtgacggtaccttttaaagaagaggcttttgccagagcggatgagcttactgaacgggcagcgttggctggtgctgttaataccctcaagcggttagaagatggacgcttgcagggtgacaataccgatggtataggtttgttaagcgatctggaacgtctgtcttttatccgccctggtttacgtattctgcttatcggcgctggtggagcatctcgcggcgtactactgccacttctttccctggactgtgcggtgacaatcactaatcggacggtatcccgcgcggaagagttggctaaattgtttgcgcacactggtagtattcaggcgttgagtatggacgaactggaaggacatgagtttgatctcattattaatgcaacatccagtggcatcagtggtgatattccggcgatcccgtcatcgctcattcatccaggcatttattgctatgacatgttctatcagaaaggaaaaactccttttctggcatggtgtgagcagcgaggctcaaagtgtaatgctgatggtttaggaatgctggtggcacaggcggctcatgcctttcttctctggcacggtgttctgcctgacgtagaaccagttataaagcaattgcaggaggaattgtccgcgtgaatcaggccatccagtttccggacagagaagagtgggacgagaataaaaaatgtgtatgttttcccgctctcgtgaatggcatgcaactgacatgtgcgatctctggcgagagtctggcgtatcgttttactggagatacgccagaacagtggttagcgagttttcgtcagcatcgctgggatctggaagaagaagcggaaaacttaattcaggaacaaagtgaagatgatcaaggctgggtctggttaccctgatccagatattcgtccttccatttcacgtaattattcgcggaatagcgtaacccagccttctcttcatcacttaacgggcggatctgtttgacggggctaccgagatacagatatccgctctccagccgtttattttgtgggaccagactacccgcaccaatcatcacatcatcttctactattgcgccatcaagtaaaattgagcccatcccaaccaaaactcgattgccaatggtgcagccgtggagcatcaccttgtgaccaacagtgacatcttcgccaatggttaatgggttgccatctgggttgtacgaggatttatgagtgacatgcaacatactgccatcctggatattggtgcgtgctccgatctgtacataatgtacatctccacgaatcacaacgagcggccagatccccacatcatcagccagacgaacgtcaccaatcacgacactgctatcgtcgatcattacgcgctgaccgatttgtggaaaaagatcgcggtatgggcgtaaaacatcagacatacttacctcagcaataaatgatttactaatgactttgggggcattattggccttgtgcaagtcttttagtatgcaaaaaagcaccgttttgtgtgcgattgcagcaaaaagggtgaaaaaacaacaaacagaaaaaaagatcaaaaaaatacttgtgcaaaaaattgggatccctataatgcgcctccgttgagacgacaacgtgaaacacttcacaagatggtcgtaacaacgaagagaaaaaatcctgaaattcagggttgactctgaaagaggaaagcgtaatatacgccacctcgcgacagtgagctgaaagccgcgtcgcaactgctctttaacaatttatcagacaatctgtgtgggcactcgaagatacggattcttaacgtcgcaagacgaaaaatgaataccaagtctc

SEQ ID NO: 216 - DNA, 25726 bp, Escherichia coli
  source 1..25726: mol_type = genomic DNA
tcgccagtgatgacggcattgttgcacgtattcctgacaccgatggtaaattgcccgatgccgcgatttttttgtttgaaccagaaaagttgctgcaaattgtccgcgaggcggtaggcagttcggcacttttcgccgcccgttttcgcgaatgcgccgcgcgggcattattaatgccgggccgcacgccgggccatcgcaccccgctttggcaacaacggctgcgcgccagtcagttgctggaaatcgctcagggatatccggattttccggtcattctcgaaaccctacgcgaatgtctgcaagatgtttatgatcttcccgcactggaacgtttgatgcgtcgcctgaacggtggcgaaattcaaatatccgatgtaacgactactacgccctcgcctttcgccaccagtttattgttcggctatgtcgcggaatttatgtaccagagcgacgccccgctggcagagcgccgggcatccgtactgtcgctggacagcgagttactgcgcaatctactcggacaggtcgatccgggggaattactcgacccgcaggtcattcgccaggtggaagaagagttgcaacgactggctcctggcagaagagcgaaaggtgaagaaggattgttcgacctgctgcgcgaactggggccaatgaccgttgaagacctggcgcaacggcatacaggcagcagtgaagaggttgcgtcgtatctggaaaatcttcttgcagtaaaacgaatcttcccagcgatgattagcggacaggagcgtcttgcctgtatggatgatgccgccaggctgcgtgatgccctcggcgtacgactaccagagtcattgccagagatttatttacatagagtcagttacccgcttcgcgacctctttctgcgctatctccgggctcatgctctggtcacggctgaacaactggctcatgagtttagtctcggtattgccattgtcgaagagcagcttcagcaactgcgtgaacagggtctggtgatgaatctgcaacaagacatctgggtgagcgatgaagtatttcgtcgtctgcgtttgcgctcgctgcaagccgccagagaagcgacgcgtcccgttgcagccacgacctatgcgcgattgctgctggaacgtcagggcgtattacccgccaccgatggtagcccggcgctctttgcctcaacatcgccaggcgtttatgagggcgtagatggcgtgatgcgggtgatcgaacagcttgccggagtcggtttacccgcctcactctgggaaagccagatcctgcctgcccgcgtacgcgactattcgtcagaaatgctcgatgaattactggcaaccggtgcggttatctggtcggggcaaaaaaaactgggtgaagatgacggcctggtggcactgcatctacaggaatatgctgcagaatcgttcactcccgccgaagcggatcaggcgaatcgttcggcgctgcagcaagcgatagtcgctgttctggctgacggaggagcctggtttgcacaacaaatcagccaacggatacgcgacaaaatcggcgaatcggttgatctctctgccctgcaagaggcgttatgggcgctggtctggcaaggnnnnnnnnnngtcatcaccagcgacatttgggcaccgttacgcgccctcacccgcagcagttccaacgcacgcacctcaactcgccgcagtcaccgggctcgtcgtggacgtcctgtctatgcgcaacccgtctcgccgcgggtatcttacaacacaccaaatctggctggacgctggtcgttattgcaggtggagccactaaacgataccgaaaggatgctggcgctggcggaaaatatgctcgaccgctacggcatcatcagtcgtcaggcagtgatagccgaaaatatccctggcgggtttccatcgatgcaaacgctttgtcgaagtatggaagactccgggcgaattatgcgaggtcgttttgtagaaggtctgggtggcgcgcaattcgctgaacgtctgactattgaccgattgcgcgatctggcgacacaagccacgcaaacgcgccactatacaccagtggcgctctctgccaacgatccggctaatgtgtggggaaatcttctgccctggcctgcacatccggcaacgctggttccaacgcgtcgggcgggtgcgctggtggtcgtttctggcggcaaattgttactctatctggcgcaaggtggcaaaaaaatgctggtctggcaggaaaaagaggaattactcgccccagaggttttccacgcgctgactaccgcactgcgtcgcgaaccacggctgcgctttacgctaacagaagtgaatgatctaccggtccggcaaacgccgatgtttacgctgctgcgtgaggcgggattttcaagttcgccacaagggctggattggggatagagaaaggactgacggatgcccgttcgcatccgtcagtattgcaggacggattattccgcgtccggctcttcagacttgtatttagcggcagtttctttgatcagctgctgcagttcgccacgctgatacatttcgatcacgatatcacaaccgccgaccagctcgccgtcaacccacagttgcgggaaggtcggccagttagcatatttcggcagttccgcacgaatgtccggattctgcagaatatcaacataggcaaaacgttcgccacatgcggcaagcgcctggactgcctgggcagagaaaccgcagctcggcagtttcggtgaacctttcatgtacagcaggatcgggttttcagcaatctggcgttggattttttcgatagtggtgctcattgtcttgcttcctcaaacttctttacggcagtaatctgacattgtagcgggtcagtgcggcatcggaaaataacattttcatcacgcttttgctattttatccctttgctctatttgttgcatttcaaatattcgtttcttctctgatgccggcaaactggcgtatttataaccatttttagctttcactgctgcatttttttgcgctcgccaacgaaacgtattttttaacaataaaagctattaactttctcttcttctatgcattagaatcatcaagttttgtaaatcagacgcaggcatgatagacctgccttaacagagggacgctcagtggcgcggataaaccgtatttcgatcacgctctgtgctttactttttaccaccctgcctttaacgcctatggcccatgcttcaaagcaagccagggagagttctgctaccactcatatcaccaaaaaagcagataaaaagaaaagcacggcaaccaccaaaaagacccagaaaacagcgaaaaaagccgccagtaaaagtacgaccaaaagcaaaaccgcttcttccgttaaaaaatcttccattaccgcttctaaaaacgccaaaactcgcagcaaacacgccgtcaataaaacggcctcagccagctttaccgaaaagtgtaccaaacgtaagggctataaatcgcattgtgtgaaagtcaaaaatgccgcgtcaggaactcttgccgacgcgcacaaagcgaaggtgcaaaaagctacgaaagtggcaatgaataaactgatgcagcaaattggtaagccatatcgttggggtggcagctcaccgcgtaccggttttgattgcagcggcctggtttattacgcttataaagatttggtgaaaattcgtattccgcgtacggcgaatgaaatgtatcacctgcgtgatgcagcgccaatcgaacgtagtgaactgaaaaacggcgacctggtctttttccgtactcagggacgcggcacagccgatcatgtcggcgtgtatgtcggcaacggcaaatttattcagtcaccgcgcacaggtcaggaaattcaaatcacttctctcagtgaagactactggcagcgccactatgttggcgctcgtcgggtaatgaccccaaaaacacttcgctaaaactttaccctgttgttacggcaacagggtaagttcatcttttgtctcaccttttaatttgctaccctatccatacgcacaataaggctattgtacgtatgcaaattaataataaaggagagtagcaatgtcattcgaattacctgcactaccatatgctaaagatgctctggcaccgcacatttctgcggaaactatcgagtatcactacggcaagcatcatcagacttatgtcactaacctgaacaacctgattaaaggtaccgcgtttgaaggtaaatcactggaagagattattcgcagctctgaaggtggcgtattcaacaacgcagctcaggtctggaaccatactttctactggaactgcctggcaccgaacgccggtggcgaaccgactggaaaagtcgctgaagctatcgccgcatcttttggcagctttgccgatttcaaagcgcagtttactgatgcagcgatcaaaaactttggttctggctggacctggctggtgaaaaacagcgatggcaaactggctatcgtttcaacctctaacgcgggtactccgctgaccaccgatgcgactccgctgctgaccgttgatgtctgggaacacgcttattacatcgactatcgcaatgcacgtcctggctatctggagcacttctgggcgctggtgaactgggaattcgtagcgaaaaatctcgctgcataataactgatggcaaatgcagcattgcctgatgcgcttcgcttaccatgccaacgcggatgaggcgttaacagcgcattcggcaagataaatcgcacgttgtcagcaactgtaacgcagaaggttatccttctgcgtttttgtttaattagctgttagcaacgcaaactgtttcaggttgttttctggctgacataaacaccagcaataatgccagtcccgcgacaatcgctcccatcaccggcacaaagctgtatcccagcccagcggaaattaccgcaccaccagcagctgctcccagcgcatttccaagattaaaggcaccaatattgactgatgaagacagacctggcgcttcactggcgacacgcatcacgcgcatctgtaacggcggtacgaccgcaaaggttgctgcgccccacaccaccatgctaatagctgcgccgaactcattgcgggccaggaacgggattgccagcataatcaccatcaacaacaacaaaaagcctttcaacgtgccgttaactgaacgatctgccagtttgccgccgagatagttaccgatagagaatccgacaccaatcagcaccagcattgccgtgacgaacaccggtgttgcgtgggtaatactttgcagtaccggagagatataggtgtagagagtaaacattgcaccagctcccagtaccgtcgtcagcaatgcagacagcacctgcggacgcattaataccgccagctcttttttcacttcaggtcgtgcccctgcaccacctttaggtaatgagaagaacagacttaccattgaaatcactcccagccccgccgttgccagaaatgacatccgccagccgatggtttcacccaaccaggtcgccgccggcacgccaccgatatttgccagggttaaccccataaacatagtggcaactgcgctggcctgtttatgttttggcaccacgcttgcggccacgactgaacccaaaccaaaaaatgctccgtgattcaggctggtcaaaatgcgtgaaagcatcagggtcatataatccggcgcgatggcggaaagtacgttgccgagcgtgaaaattgccatcaggaaaatcaacgcactgcggcgggcacgatgagaaagtagaagcgtcatcagcggcgcgccaaccattacgccaactgcataggcactgattaacattccggcagcgggaatcgagacatccacaccgcgcgcaatgacgggcaacaaacccattggcgagaactccgttgtcccgataccaaacgcgccaatcgccagcgccagcaacggatagttaattttcatgccttatctccacctcttcgcgtcattacgcgatattcattaaagtggcgaaagcatgacagcaatcacaaaaaaatgaaaataacaaaaagagaaaacacttttgccattttgctaacaaacaggaaggagatgcgagggagaacgcgctccctcgagaggaaatcagtgcagcgcggcagtcaaacccacggccacgatcaaaccgaggacgataatcgttgttaccagtgaaaatttaaggtcggtgctcatcaagttttctccttttttattaccacacaaatagtgatattacgcatttttacacactgtgatgaaaaaatctcccgtcatttataatgataagtgtttttaccacttccccttttcgtcaagatcggccaaaattccacgcttacactatttgcgtactggccattgaccccttcctgacgctccgtgtcgtttttccggcgtaccgcaacacttttgttgtgcgtaaggtgtgtaaaggcaaacgtttaccttgcgattttgcaggagctgaagttagggtctggagtgaaatggaatggcaacaataaaagatgtagcgaaacgagcaaacgtttccactacaactgtgtcacacgtaatcaacaaaacacgtttcgtcgctgaagaaacgcgcaacgccgtgtgggcagcgattaaagaattacactactcccctagcgcggtggcgcgtagcctgaaggttaaccacaccaagtctatcggtttgctggcgaccagcagcgaagcggcctattttgccgagatcattgaagcggttgaaaaaaattgcttccagaaaggttacaccctgattctgggtaatgcgtggaacaatcttgagaaacagcgggcttatctgtcgatgatggcgcaaaaacgcgtcgatggtctgctggtgatgtgttctgagtacccagagccgttgctggcgatgctggaagagtatcgccatatcccaatggtggtgatggactggggtgaagcaaaagctgacttcaccgatgcggtcattgataacgcgttcgaaggcggctacatggccgggcgttatctgattgaacgcggtcaccgcgaaatcggcgtcatccccggcccgctggaacgtaacaccggcgcaggccgccttgccggttttatgaaggcgatggaagaagcgatgatcaaggtgccggaaagctggattgttcagggtgactttgaacccgaatctggttatcgcgccatgcagcaaatactgtcgcagccgcatcgccctactgccggcttctgtggtggcgatatcatggcaatgggcgcactttgtgctgctgatgaaatgggtctgcgcgtcccgcaggatgtttcgctgatcggttatgataacgtgcgcaacgcccgctattttacgccggcgctgaccacgatccaccagccaaaagattcgctgggtgaaacagcgttcaacatgctgttggatcgtatcgtcaacaaacgtgaagaaccgcagtccattgaagtgcatccgcgcttgattgaacgccgctccgtggctgacggcccgttccgcgactatcgtcgttaatcacccgttgcgggagtctcttccggctcccgcagccactccttattcagcgtctcactatcgccgagatactcaagcagccaggttaacgcaggcgacatatcattttgctgccatgtcagacaacatgccgaatccgggaaggggttttccaattcaagtgctacccacttcccctcattaagccacggtttggcgaaatgtgttggcaccatccctatgcataatcctgccgagatacaggttgccgatgattcccagtcaggcacgacaactcttttttggttatccagcaaccaggtaatacgtttaggtagcgttcgcgaggtgtcttcgcgcaccaacgacggccagttgcgcaacgtatcatcgctgaatgggccatccatcaacgccagcgggtggtggctggcaacaacgcaactccagcttagcatccccatatcccggaaggcataacgaccgcctaccggaatcgcgcgtgttgcgccaatcgccagttccacgcgcccgtcggaaagcgcatcccagacaccgttgaacacttcctgaaagacaagaagttcgacatcatcaaaatggcgataaaaatcaacgatcatctgccgtgtacgttctggcctgacaatattatccactgcgatagctaactgaccgcgccagccgttcgctatctgctgacattgctggcgggtgatctgcatttttttgacaacagagcgcccttctttgagaaaccacgctccagcagcggtcagctccacatcacggtgccgtcgttcaaagagcggcaccgccagccactcttccagctgacgcacggtatagctgaccgcagaaggaacgcgatgcagctcctgtgccgcagcgctaaaactaccattacgcgctaccgcatcaacaacttcgagtgaatattctgaccacatagtctgcctgcaaaatttttgaaaccagtcatcaaatattaccgtttcacaacactaatttcactccctacactttgcggcggtgtttaattgagagatttagagaatatacatgcaacctgggaaaagatttttagtctggctggcgggtttgagcgtactcggttttctggcaaccgatatgtatctgcctgctttcgccgccatacaggccgacctgcaaacgcctgcgtctgctgtcagtgccagccttagtctgttccttgccggttttgccgcagcccagcttctgtgggggccactctccgaccgttatggtcgtaaaccggtgttattaatcggcctgacaatttttgcgttaggtagtctggggatgctgtgggtagaaaacgccgctacgctgctggtattgcgttttgtacaggctgtgggtgtctgcgccgcggcggttatctggcaagcgttagtgacggattattatccttcacagaaagttaaccgaatttttgcgaccatcatgccgctggtgggtctatctccggccctggctcctctgttaggaagctggctgctggtccatttttcctggcaggcgattttcgccaccctgtttgccattaccgtggtgctgattctgcctattttctggctcaaacccacgacgaaggcccgtaacaatagtcaggatggtctgacctttaccgacctgctacgttctaaaacctatcgcggcaacgtgctgatatacgcggcctgttcagccagtttttttgcatggctgaccggttcaccgttcatccttagtgaaatgggctacagcccggcagttattggtttaagttatgtcccgcaaactatcgcgtttctgattggtggttatggctgtcgcgccgcgctgcagaaatggcaaggcaagcagttattaccgtggttgctggtgctgtttgcagtcagcgtcattgcgacctgggctgcaggcttcattagccatgtgtcgctggtcgaaatcctgatcccattctgtgtgatggcgattgccaatggcgcgatctacccgattgttgtcgcccaggcgctgcgtcccttcccacacgcaactggtcgcgccgcagcgttgcagaacactctacaactgggtctgtgcttcctcgcaagtctggtagtttcctggctgatcagtatcagcacgccattgctcaccaccaccagcgtgatgttatcaacagtagtgctggtcgctctgggttacatgatgcaacgttgtgaagaagttggctgccagaatcatggcaatgccgaagtcgctcatagcgaatcacactgatctatatcgatatacttatacttaggctgctaacaaaattttgttgtatgattgaaattagcggcctatactaatttcgagttgttaaagctacgataaatattatgtttttacggggacaggatcgttcccgactcactatggatggtcatttcggcaaaggttcctcctttccctctgttctacgtcggattatagactcgcggttttttctgcgagatttctcacaaagcccaaaaagcgtctacgctgttttaaggttctgatcaccgaccagtgatggagaaactatgagttcatcgtgtatagaagaagtcagtgtaccggatgacaactggtaccgtatcgccaacgaattacttagccgtgccggtatagccattaacggttctgccccggcggatattcgtgtgaaaaaccccgatttttttaaacgcgttctgcaagaaggctctttggggttaggcgaaagttatatggatggctggtgggaatgtgaccgactggatatgttttttagcaaagtcttacgcgcaggtctcgagaaccaactcccccatcatttcaaagacacgctgcgtattgccagcgctcgtctcttcaatctgcagagtaaaaaacgtgcctggatagtcggcaaggagcattacgatttgggtaatgacttgttcagccgcatgcttgatcccttcatgcaatattcctgcgcttactggaaagatgccgataatctggaatctgcccagcaggcgaagctcaaaatgatttgtgaaaaattgcagttaaaaccagggatgcgcgtactggatattggctgcggctggggcggactggcgcactacatggcatctaactatgacgtaagcgtggtcggcgtcaccatttctgccgaacagcaaaaaatggctcaggaacgctgtgaaggcctggatgtcaccattttgctgcaagattatcgtgacctgaacgaccagtttgatcgtattgtttctgtggggatgttcgagcacgtcggaccgaaaaattacgatacctattttgcggtggtggatcgtaatttgaaaccggaaggtatattcctgctccatactatcggttcgaaaaaaaccgatctgaatgttgatccctggattaataaatatatttttccgaacggttgcctgccctctgtacgccagattgctcaatccagcgaaccccacttcgtgatggaagactggcataacttcggtgctgattacgatactacgttgatggcgtggtatgaacgattcctcgccgcatggccagaaattgcggataactacagtgaacgctttaaacgaatgtttacctattatctgaatgcctgtgcaggtgctttccgcgcccgtgatattcagctctggcaggtcgtgttctcacgcggtgttgaaaacggccttcgagtcgctcgctaaaggctattctatcgccccctctccgggggcgatttcagatcaggcttctgtacctggttgattcatggcattttctcgtgccgccagcacacgttctaccgtatctaccactgcctgagtttgtggatcaatttcaatgttgacgcgtgcgccgagttttttcttcccaagagtcgtgcgttccagagtttccggaattaaatggacgcaaaaacgcgttggcgtgacttcgccgacggtcaggctaataccgtcgatgccaataaatcctttgtacaggatatatttcatcaactgactatcctggactttaaaccagatctggcgattattttccgaggttaatattttcgccacttcagcggtggtcataatatgacctgacattaagtgtccgccaatttcatcactgaatttcgccgcacgctcaacgtttacccaatcccccacttttaaatcgccaagattggtaatgcgtaacgtttctttcatcaggtcaaaactgacatggttgccgttaatttccgtcacggtcaggcagcaaccgttatgcgccacggaagcacctgtttccaggccgtccagcatgtggtcgggtaactccaccacatgcgtacgaaaatttggtttctcgtcaatcgacaccagttttgcggtgccctgtacaatccccgtaaacatacttacaactcctgaaatcagttaagacattctgttcagcacaatagcaggtggcaaacgcccttaccagtgaaggggtaagaatgactattttttcactggagaattaataaatcctcgctacaatagactgaatttcccctgcttcttctttttgctgcccattcaggcggctttttagtctctcatataactacaaataaaaggtgttcacgtgcagaagtatatcagtgaagcgcgtctgttattagcattagcaatcccggtgattctcgcgcaaatcgcccaaactgcgatgggttttgtcgataccgtgatggcgggcggctatagtgccaccgacatggcggcggtcgctatcggtacttctatctggcttccggcgatcctctttggtcacggactgctgctggcattaacgccggttatcgcgcaattaaatggttccggtcgacgtgagcgcattgcgcatcaggtgcgacaaggtttctggctggcaggttttgtttccgttctcattatgcttgtgctgtggaatgcaggttacattatccgctccatggaaaacatcgatccggctctggcggacaaagccgtgggttatctgcgtgcgttgttgtggggcgcgccgggctatctgttcttccaggttgcccgtaaccaatgtgaaggtctggcaaaaaccaagccgggtatggtaatgggctttatcggcctgctggtgaacattccggtgaactatatctttatttatggtcatttcggtatgcctgagctcggtggcgttggttgtggcgtggctactgcggcggtgtattgggtcatgttccttgccatggtttcttacattaaacgcgcccgctccatgcgcgatattcgtaacgaaaaaggcaccgcgaaacccgatcctgcggttatgaaacgactgattcaactcggtttgccgattgcgctggcactattctttgaagtgacactgtttgccgtcgtggctctgttagtgtctccgctcggtattgttgatgtcgcaggacaccagattgccctgaactttagttcactgatgtttgtgcttccaatgtcgctggcggcagcggtaactatccgcgtaggttatcgtctgggtcagggctcaacgctggatgcgcaaaccgctgcgcggaccgggcttatggtgggtgtctgtatggcaaccctgacggccatattcacggtttcactgcgggagcaaatcgccctgttgtacaacgacaatcccgaggttgtaacgctggctgcgcatttgatgttgctggcggcggtatatcagatttctgactcaatccaggtgattggcagtgggattttgcgtggttataaagatacgcgttccattttctatatcacctttacggcttactgggtgctgggcttgccaagcggctatattctggcactgaccgatctggtcgttgaacctatggggccagcaggcttctggataggctttattattggcctgacgtcggcagccattatgatgatgctgcgtatgcggttcctgcaacgtctgccgtcagttatcattctgcaacgagcatcccgctaataaagacaaggcgcaaccttcacgggttgcgcctgtgtttttacgcaggctggagcgttgcgccaatcccgtcttcgtctggctgtaatttcagagcgttgcacagagtttgccgactggcatctgttatctcaacgtgtatatccccggtaacttcccctttcacattgatgaagtcaggtgagatttctttcgcactggtttgcaggcaaatcgctccctctccgcgcaggcgtttcactttcagttgcacatgcgttgccgcaccagtgatcagccacagttttccgccattcagattgatgttaccaacaataaaagtgacaccgtcaccttttaccgtactgccgtcgagaatcaacacaccgccctgctgtacagtaatcgttgattgttgcagatctgcgccatagccaataatcattgaagcgccgtccagtaatgcaacactcccggtcagttcaaccggtgcgcgatcttcctctacgacaaaattttcgtccgcgctggtgggtgacaacaggatcactgttccaccttgtattaccgcattttccagcgtaccggcatgcacttcagcccgaccacccacattcacggacaggttttgcgtcttaccggaactgtagagctgaaggccatccgtccccagacgataaatggatccattctcaacaatagtgtcagagtcttcaccaccgagattattcatggtgccaccagcaagcaacgtatcactggctttcccggccagcataaaaacgccgccctgattaatctcacaattgctggcttccccacctggatacaccaacaattcaccaccttcatctaccacgaccgctgaggttgtcccattaaccaacaggccgccctcttgatcgagaatgattttttccgcgcgatgtccttccagtacacgcaggttaccgccattttccagcaacaaaccgcaggcataaccctgatcaacgctgaattcaccttcgggatggcggccattaaccgtagcgagcgtagagagactaattgcgcctccctcggactgaacaatatctgtggcaatggcaccgtcgctgaccgatagcgtgccattgttaccgtactgtgtgcatttggcgatcccaccggttgccactttcaaccagccagcccccgtgaccacggtattttcggctcttccgccagcttcaacaatcaactcgccttcagtaagttgcgtcgcgccaatgacctcgccggtcttaacaatttgcacattcccgtcgctcatcaagtttttcgcatcagatcccatgatttattcctttgctgcatctgtgtgcctttattgctacctaagtgtaaaggctacggaggatttatccacgacagatttgagatggtggcaaacaactctgtttaaactctgatacacgaattattgggttgtatcagatgtaaatgcgatcctgaataaaaatcgcccttgcaaatcaacaaaatatagccaatttgcttaaaagctctgcaaacggtcgaaatagcgcagaaaattacgttttgcctcttgccaccttcccactctgccgctaatattcgtccccgttgtcacctacaacgttgcgttcatagctcagttggttagagcaccaccttgacatggtgggggtcgttggttcgagtccaattgaacgcaccatcctgcgtccgtagctcagttggttagagcaccaccttgacatggtgggggtcggtggttcgagtccactcggacgcaccagattttcttaatctggtcttctcctttttccctctgtttcttctctgtatccaatacgttaaaagatttacactgtcttcgtatgcgttatcagaaggagaatcgctatggcaactttgttacaacttcattttgcttttaatggcccatttggcgacgcaatggctgagcagcttaaaccgcttgctgagtcgattaatcaggaacctggttttctgtggaaggtatggacagaaagtgaaaagaaccacgaagccggtgggatctatctttttactgatgaaaaaagcgcccttgcctatctggaaaaacatactgcccgacttaaaaatctcggcgttgaggaagttgtcgccaaagttttcgatgtcaatgagccactgagtcaaatcaatcaggcaaaactcgcctgacagaatttaatcaagggcggttagcgcccttttcatccctgtctgaaatttctcaaattctaaaaatctcaaccaaacttatctgataacactaaattcgaaagaatgcgtacaggtaagtaacaatgaaaaaaattgctattgtgggtgccgggcctacggggatctacaccttattctcgcttctacagcaacaaactccactttctatttctatcttcgagcaggctgacgaggccggtgtcgggatgccatacagtgatgaggaaaactcaaaaatgatgctggcaaatattgccagtattgaaataccgccgattaattgtacgtatctcgaatggctacaaaagcaagaagccagccatctccagcgttatggcgttaaaaaagaaaccttgcacgatcgtcagtttttaccgcgaattctgctgggcgaatatttccgcgatcaatttttacgattagtagaccaggcacgacagcaaaaatttgcagtggctgtttatgaatcatgccaggttaccgatctgcaaattacaaatgctggcgtcatgctcgctacaaatcaggatttacccagcgagacgtttgatttagtggtgattgccacgggtcacgtctggcctgatgaagaagaagcaaccagaacgtattttcccagtccgtggtcaggcctgatggaagcaaaggtcgatgcgtgtaacgtgggtattatgggaacatccttgagcggactggatgcggcaatggcagtggctattcagcatggttcgttcattgaagatgataaacaacacgtcgtttttaaccgcgataacgcaagtgaaaagctaaatattacgttgatgtcgcgcacgggtattttacccgaagccgatttctattgccctattccctacgagcccttacacatcgtcaccgatcaggcattaaatgctgagattcaaaaaggtgaagagggccttttggatcgggtatttagattgatagtagaggaaatcaagtttgctgatccagactggagccaacgcatagccttagagagcctgaatgtcgattcctttgctcaagcctggtttgccgagcgcaaacaacgcgacccatttgactgggcagaaaaaaatctccaggaagtcgaacgcaataaacgagaaaaacatactgttccctggcgttatgtcattctgcgcctgcatgaagccgtacaggaaattgttccacatctgaatgaacacgaccataaacggttcagtaaaggccttgcccgggtttttatcgataattatgcggcaatcccttcagagtctattcgtcggctgctggccttacgtgaagcggggatcattcatattctcgccctcggtgaagactacgaaatggaaattaatgagtcgcgcaccgtcctgaaaacggaagacaacagctactcgtttgacgtttttattgatgcccgcggacagcgtccgcttaaagtgaaagatattcctttccctgggctacgcgagcaattacagaaaacaggggatgaaatccctgatgttggcgaagattatacgttacagcaacccgaagatattcgtggacgcgtagcgttcggcgcgttgccctggttgatgcacgatcagcctttcgttcagggacttacggcatgtgcagaaattggtgaggcgatggctcgagcggtcgtaaaacctgcatcccgtgcacgtcggcgtctttcgtttgattaaaggtaaagctatcagcactcaacaaactgatgctgttcattaagacgatagcggactccggctcgaatattgttttcaccttcaatggcgacggcgaagcgaactctttcgccgtcatgatatgccagtgcggcgcttccccctgccccgagaataattgagtcgaccacgcccgtgctcactaccgttgaattttcaccgctggcaatgatgtgtacattgtcgccgctgttggcaattctggcgtttgcgccaaagctggcgatttgcgccaggtcaccattactggcgacatgacaccgttcacccaatgtacaaacgcgtactcgcattccggtgttcgcaatccgactactatctccagcgctgcttatccgcgaagaattaccggttacagcaacccgtgcgcgttcaccggagctgccaatgtgactgttaaagccgacacttccaatccgcacgctataacccatactggcaatttgcgcggcatacccagcggttgcgattcgggcgttatcctcacaacagccgatgcgagcatgatcgtcgctgcgggcaaactgactgcaaaatggtatctctccggggtctgtggccagtttttgcatagaggaaacttcctgatgcgcgaagttttcatccgccagccattttttccacgcatactcaaccagactctccgcccagtccgtatatccttcctcaatcagtgcatgatgaatatcggcataactaccgccgcgtgggaaatggcgcaggaaccagcgatacatcaccgctccgatacgccattctcgcaggtctgctcgtgtaatgatcattcgttagtgccggtgatagccatcgaccatgcttttaaaggtttcgtgtggcgtacgccccgtggtgcaaagataaagatgaccgaagataaaaaagaggcttataaatgccagagcaaaatgcgcctgcaataaccagtatcttacgccaggaaacacatctcccacggcttgcggatagagacacagcagccccgtcaatagtaacaacggcagcaatccatacataacaccaacataggcgacctgctgtaagggattaaatttagactgggttgttgccgggaaaggatgttcttccccctgcataatgccaaacaaataaaatcgcgtttgttttgccgctcgctccagccacccctgacgacgaatgcgatagtggtgaccattacccccaacggcattgatcagcacaaagccgagccagcatgcgagtaacaaaaatccgcaaacttcatgcaccgcaaccagacttttaaccgcagttgcgcccaccagcgcaaagtgatttatcagcccacttgccagcaacaatacaaagagtaacgcattcgaccagtgccataatctgaccgctttgcagtaaagataaatcttctcaccataatcggtgactgatttcttcacgccacgagcacgaagcaaggcatgcagccccagcaccaaccacatcccaaccagcaatactccggcaatgatcaaccacaccggccaaaattcgggagtgaactgtggcacatagttcgctaactggctctgaaactgttcagcatgttgcgacgggttcatacattttcctttttaatcaaatgttgaccgaaccggcgatacagatgcggtttcccggcaccaggtagctgatattgatagtatttattttgctgcaaccacgcctgaatttctgggctatcttcgcgaccaaagatcaatgcgtgttccggacaggcgctgacgcaaatgggcggaaagccttttgccagtcgggactcagcgcagaaatcacatttatctgccactttagtgacagggttaaggtagcgaacctggtacggacaagcgccaatgcaataactgcagccgatgcactgcgatttttctacccgcacgatcccctgctcatcacgccacgacgcccctgtcgggcatacgtcgatgcacggagcatcttcgcagtgctgacatgactggcgaaaaaagtgatactgcgtttcgttgtcgttatcggtgactggaatgtgtgctatcgataaacggcttccctgagcggggacgtggttagttttacggcatgcgcgggcgcaaatattacagccattgcaccgtgactcgtcatgaatcatggcataccgaacttccttttcttgcctcgtgttcgctaacagagaagacgcagaaccagtaaaaaagattactgttcccatccccagaacaaatttgcgtcgagtgaaggacatctgattatcccctaatgcagtggctgcaactgtccaccctatccatgacatctccctgaaatttcaggggttctgaaactgctctacctcgaaccattcgcataagccataagccttgccataggtcataaatcgctcgctaaacaagtacaacaccgccgtcgatgactccacctgccgtatatcggcatattcaggtgcaacatccatcgcggcgatcgcggcttcaatctgcgcttcctggaagtaatatggcgcttgcatcagcatggcgactttgtaaggacgaggatacgtctggcactcaaaacgaacggcgtgtgcaatggcgcgacaaatgtcctgctccacaacttgcaaagacatcgccgcgtagttttcactcatggcctgcgttgagtaatagtaatcatcctggcttcccgtcatacaagcgatatccgcgtagtctccgttctgcttaatgctttccagcaaaactgacagctcctcttctgcaaccgaatagggtggcgagagaaacacggcgcgcgccaccagctgcccagccgcagaatgctggcgaatgaactctgccaggatttcagccggttctggttcggttaccgtatcaacggggtgacgcatcccctgtaaccattgccgcttcgcctcgtcaacttcgctgactttcgctaacggcaattcatcccgatggttcatctcacccattccttacacaggcagtagattgtgtgctgccagatcggcggcaatatcttccagccccagacgctgcaatgtttcgcgggtcggacaaccaagctgtgggtcccagcccatttctttgtagaacatcgtgagcgaagcatgcatatcgtcacgatccattttgtcagtaccttcagtaaagaccgggatctgcggatccttgtcgaatacccaggaacagataagatcgtgttcattacgcatatctttggtttgcatcagttttaccgtgtaggcacgatgcaacgtaaagatacgctctgcagctaaatctaatttttcctgagtcatctcttcgccggtgatcgctttgaagaatttggcttcaagcgccagatcgccccggtaattacggcttttcagcggcgaaacggtcattggccagacccagttgcacagggtgacggcgttatgcaaacagacccgcaacagcgaccactttgcatatttaatttttgcgtcattgattggcgtgtagtttttggtttcatcgtaggcatcttcagaaccaaaaagctctttcgccacttcacgctgcagtttcaatggcaaacccgaaccaataaaattgatatgggtatgcgtcatgcagtcacggttgaacatacagttaacaatggaaccgacctgcgctgacgcttcattggcatggtgaaccggatagccaaacggcgaccagagtttattttttgcgtagccccagtactcttcacccaaattccagcgttctgcgatggcatatgaaccatcagccaggtgactcagctcacccacacgatgcgccagacggtagtaaaaatctttaatgaaattaacgtcacccgcttccagttgatcccagtgaatttccgcatactcttcagctggcagaacacgcttgaacacccctttgctgtaacaataagtaaagtcgcgatgcagctgcccgtagttacaccataggccgtagtcatcgaacaaattcagaccaaccaggttaccaatcacacgaccatcgtctttatcttcaaaatctttcggcccgttcgggaagatggtggtatggacaaagttggctacacaagtgttaccacctgtgctgggcacgccaaactctttcacccgaggaatattcatttgggtcatacaacggatcgggcaagagtggcagccactcatttttactgtgtatttctctgccgccggacctaagtcaaaaacggatttataggtacgaaagccgaccgtgttctgattgcctggcggaatttcccccgtttcaatcggaccaccttcagccgcgccccaaaacagccctttacgtgctgtccaacgtgacttgggatctgaatactctgcccacgattgcggcgtacttggcacgacatggttgttattcgcaccaataagttcagtcatcatgtaatcgttgagacgcttcatctcctgacgatcggcaatgttgacccctttcgtcccttcaaccgcaatcgctttcaggtttttcgaacccataattgcgccagttcccgcaccgccgctgtggttacggctattcaacatgccagagagaggaacaaggttttccccagcctgaccaatagccgccacacaggtttccggactggtcaatcgacaaatttcttccgtcgttgcgcgcgtcccttttccccataagaaatcggctttttccaggctaactttgtcatctttaatcttcagccataccggtgatttcgccttcccttcgataataatgacgtcgtatccagcgaatttcatttgcgctgcaaaaaagccacccatatgggcatcgacaactaaatttcctttggtaaaagtagaaagtgaggtgatatttacgcgagaactacagggggcaccagatccagttaatgggccggtagcaaagactaatttattcgcttcatcgaaaggtttcgtgcctggcggtacttcgtcatacataattttgtagccgaagcccatgccaccgacaaaacttttaaacttactggaatcttcgagggtaatatttcctgtcgtgagattgactcttaatatattacctgtccaaccgttagccatgattttttcctttgcaagattcacacagtaatatctttccactcgataacttttaacgcccctgttgggcaggcgtttgcgcattcaccgcataacacacatttcgaggattttttactttcggtatttacggtggccatcatccacgggcatgacgtagtacaggcgctacagccaatacagcgtttatgatcgacggtaatacagccttctttctgctgccaggtaatcgcaccaatcgggcagacgttcatgcattgcggctctttgcattgacggcaggtgtccgcggtatagttgagatcgccatacaggccgccgccagagccaaccccgttgtcgccaaagaaataattgcgatggattttgatacgggagaagaatgtccctactgagccatcgttgaagttggtacaagagatttcacagcggtggcaacccgtgcatcgcgctcgctgggtcaccagcacccctttgggtgtatttatcaaccctactgtgccgctatcaatatcttcctgtttgcaacccaaaagtgacagtaacgcaggggcaattgttagaccagcaaggccttttcctgatatacgcaagaattctaatcgcgttaagccaatatctaatagtggacgatcaaccgggttcatttatttcgcatcctcttcgcaaacacagtgctgacaattcagcagcctgatattaagcattcaactaatacgctgctgactctgtccccaacaccagatattttccctaacccgatagtgtatgagaaaagatttaacgccgataaactaatcctttatggttaggagaaaaaataatgtgattattctgagcccttaacattgatcgttatcaattaaaattacaaagcaagaaattataagtgaactgatatttattatcatttgaaataaatttaacttaagcgacaattatttgtgacgttcattgcagaaaataaaaataatattatcgttataaattaaaatacataccgcaattcgtataatttcagcagttgttatttagaatgattaactggaccgcaactgaagcaagaatatcaggatgaagcttaccgcctcatcctgaatggtcattttaccagtgcgttaatgacggtttccatcgcctgcttttccagctcactgcgctgaatgcgtttattggctaatgctgtacgtaatacgcctgcgataacaatatgctttggttcctgccccagatcgcgcatttccagcacaactttaccgacaactctgcacatttctcggtacagttcatcctcttttgtccgatttcccattctttatacctatttatcatgccaactatcagcatatatcaatctaaccaattaaacaaaaatcaaacaaaatcagacaaataacgcgataaattattttaactgtagcaattgagcgatgatatatttatacaccggatgaactttcacttatcctcacactgacaacttcggcaccagacgttgcgcaaacagtgaagtttttgcgtaaccttttccctggaacgttaaatctttgataacaatttattgtctaacaagttgtatttttttgaaacgctgtttttgttttccttttggattaatttcagcgtataatgcgcgccaattgactcttgaatggtttcagcactttggactgtagaactcaacgactcaaaaacaggcactcacgttgggctgagacacaagcacacattcctctgcacgctttttcgatgtcacctatccttagagcgaggcaccaccactttcgtaataccggattcgctttccggcagtgcgcccagaaagcaagtttctcccatccttctcaacttaaagactaagactgtcatgaaaaagaccaaaattgtttgcaccatcggaccgaaaaccgaatctgaagagatgttagctaaaatgctggacgctggcatgaacgttatgcgtctgaacttctctcatggtgactatgcagaacacggtcagcgcattcagaatctgcgcaacgtgatgagcaaaactggtaaaaccgccgctatcctgcttgataccaaaggtccggaaatccgcaccatgaaactggaaggcggtaacgacgtttctctgaaagctggtcagacctttactttcaccactgataaatctgttatcggcaacagcgaaatggttgcggtaacgtatgaaggtttcactactgacctgtctgttggcaacaccgtactggttgacgatggtctgatcggtatggaagttaccgccattgaaggtaacaaagttatctgtaaagtgctgaacaacggtgacctgggcgaaaacaaaggtgtgaacctgcctggcgtttccattgctctgccagcactggctgaaaaagacaaacaggacctgatctttggttgcgaacaaggcgtagactttgttgctgcttcctttattcgtaagcgttctgacgttatcgaaatccgtgagcacctgaaagcgcacggcggcgaaaacatccacatcatctccaaaatcgaaaaccaggaaggcctcaacaacttcgacgaaatcctcgaagcctctgacggcatcatggttgcgcgtggcgacctgggtgtagaaatcccggtagaagaagttatcttcgcccagaagatgatgatcgaaaaatgtatccgtgcacgtaaagtcgttatcactgcgacccagatgctggattccatgatcaaaaacccacgcccgactcgcgcagaagccggtgacgttgcaaacgccatcctcgacggtactgacgcagtgatgctgtctggtgaatccgcaaaaggtaaatacccgctggaagcggtttctatcatggcgaccatctgcgaacgtaccgaccgcgtgatgaacagccgtctcgagttcaacaatgacaaccgtaaactgcgcattaccgaagcggtatgccgtggtgccgttgaaactgctgaaaaactggatgctccgctgatcgtggttgctacccagggcggtaaatctgctcgcgcagtacgtaaatacttcccggatgccaccatcctggcactgaccaccaacgaaaaaacggctcatcagttggtactgagcaaaggcgttgtgccgcagctggttaaagagatcacttctactgatgatttctaccgtctgggtaaagaactggctctgca

SEQ ID NO: 217 - DNA, 25692 bp, Escherichia coli
  source 1..25692: mol_type = genomic DNA
cgttaagctacatctcagagcacttacgctctgggcaagaaacttgacgagctttgcagataatcaaaaaaccatctgatgataaaactgaactgcgggatcagctgtgatttgctccagtcttcgcttttcgacaccccggtaaaggagtcgagaaagaatagaatggcggcaacaatcaacacaccgcgcaacgcaccgaaacagacgcccagcacccgatcggtgcctgacaaccccgttttctccaccagctggcctatcacgaagttcacgatagcaccaacgatcagggtagcgataaatagtaccgcgatggcaatcccatttcgaaccagttcgtcttcaaagcccgtaaaccagactgacaggtaagtgtagtaatgactggcaacaaagaaagcacaaccccatgtcaccagcgataacgcttcacgaacaaagccgcggatcaggctaaccagagaggaaaaagcaatcaccgcgattatggcgtaatcaatccagaccatatgtgtcccacgattttacgccctgtcatcctgttcggggcgcattctaacagaaaaagaaaacgtttgcgtagggatttccttcccgcgcatcaataaaaatggcgctgaaaaaatattcaacgccatcgactttttatgcctttgcggcatcgtgcaatgcgtgtcggatgcggcgtaaacgccttatccgacctacggttctaacactgcccaggcctgataagacgcgccagcgtcgcatcaggcaagactgtattaattcggcgtatagcccattaccacgccacttaagccagaaagttgcttcaactcacccagcgaacctttcagcttatctttcgaggcatccggcccaaccagaatacgggtaattttaccctgcactggcgtggatggcgacgtataaacccgataaccggcaccgcgcagcttaccgacaatctcattcactttatcggcatttttcagcgcacccagttgcacaacataggctttacccgttggcgctgctttttcttccacgaccggcttcggttctggcttcggcgcaggtggtgcttcaaccttcggtttaggcggctccaccggtttcggcttcggtggggcgaccggtgcaggttccggttcaaactcggtgttattggctgcaatagtggccggatcgagcgacggtgctgcggcatcacctgcccgcacctcttccgctgcgccttccggcggctgcgtcggcaacgcctgggtggcggctggcatcatatcaggctcatcacgatcgcccgctttcggcaccagcgggatagccgcgaactcatcctgataatgttttttctgcccgtccagcagccctggaagtacaatcacccccagcgccaccagcacgatcgtgcccactaaccgattctgaaacttacttgccaccgcttctcctcgcgtcaatcacttccatgacatgtgcgaccgtgtggaaagaaccacacaccagcacggtgtcttccgctttagcgtccgccattgcggcatcccatgcctgcgcaacgctatcaaatgatttgccgttacccaaatgctcaagcagttgttctgccgtggcaccgcgcggcccttccagtggcgcacaataccagtcatcaaccacgcttttcaaccaggccagagttccggcaatatctttatcatgtagcataccgataaccgccagcacgcgcccgtttttcggtagcgctttcatacgcccggtgagatattccgccgcatgtggattatgcgcgacatcaaaaataacgcgtggcgactcgctcacaatctggaaacgtcccggcaaaattgcgctggcaatcccgtcgcgaatggcattttcactgacttccagcccgctggcacgcagtgccgccagcgctgttgcggcattcggttgcgggacaagcggcaacggcagattttccagcgtgccgtgagcatcgctaaacgcccagtcatgatcggtgacggaatagttccactcaacgccccgacgttgtaacagtgcacctttttcctgcgccacatcagcaatggtagaaggcatttccggctcaccgacaattgccggttttgcgctgcgaaagatgcctgctttctcgcgaccaatactttcgcgatctggtcccagccagtcggtatgatccagcgcaatgctggttactacagccacatcggcatcgacaatattggttgcgtccagacgaccgcccagccctacttccagaatcactacgtcaagttgtgcctgtttgaacagccacaacgccgacagcgtaccgtactcgaaataggtcagggaaatatcaccgcgtgccgattcaatctccgcaaaagaggcggtgtgggccgattccggcaattcctgcccctgcacacgtacgcgctcggtataacgcaccagatgcggtgaactgtagacgcccactttgtaccctgccgccatcagaatcgactccagcgtacggcaggtggtgcctttgccattcgtacccgcaacggtaaacacaaatggcgctggtttcaggacgccaagacgcgccgcgacctggctcacgcgctcaaggccgagatcgatagttttactgtgcaggttttccagataagaaagccacgaagccagaggcgacgcggcttgaggagtgcgtttgataatcatggtatccgctgattcgttacggtgagaatagcaaaagggcagagccagtggccctgcccttatcagttatcaggcctcaggttcctgatccggtaccgggggtaccactacgccttcacgcggcgcttcaggattcggcgctggcagattcatcaacttcgccagaatgctcgccagtttcaggcgcatttccggacgacggacgatcatgtcgatcgcgcctttctcgatcaggaattcactgcgctggaatcctggcggcagtttttcgcgaacggtctgttcgataacacgcggaccggcaaagccgattaacgctttcggttcagcgatgttgagatcgcccagcatggcgaaacttgcagaaacaccgcccatcgtcgggtcggtcagcacggagatgtacggcaagccgcgctcctgcatttttgccagtgccgcagaggttttcgccatctgcatcagcgacatcagtgcttcctgcatacgtgcgccaccagaggcggagaagcagatcagcgggcagttatcttccagcgcctgctcaacggcacgcacgaaacgtgcacccacaacagaccccattgaaccgcccataaaggcgaactcgaatgccgcagcgacaaccggcattccatacagagtgcctttcatcaccaccagcgcatctttttcgccagtttctttctgcgcagatgccagacggtctttatacttcttggagtcacgaaacttcagcacatctttcggctcaagctcgctacccagctccacaaggcttccttcatctaacaggctatgcaggcgattacgcgctgtcatacgcatgtgatggtcacacttcggacagacctcaagattacgttccagctcagcgcggtataaaacctgaccgcagctatcacacttagtccacaccccttcaggaatgctcgccttgcgggtgggagtaatgttgcttttaattcgttcaatccagctcattagggacctttctgtctgaacctggttcgatgccagttttatctttggggacgcataatgccatttttgcccccaacagaccatgaatgttgcacattaaaacataacagcccgaaactttggataaaaaagtggtcgaaccgcggagttactttttattttgcggcgcgtgccgcagcgcgtttgtgacgaataaattcgaaaaccccaggcaatattgaaacaaaaataatgccaacaatcatcagcttaaggttgctctgaatgaaggggagcgtgccgaagaaataacccgcgtaggtaaaaatcagtacccacaacagtgcgccgatcacgttataagcggcgaaatgacggtacgacatgtggcccattcccgcaacaaacggcgcgaacgttctgacgatcggtacaaaacgggcgagaataatcgttttgccgccatgtctctcgtaaaactgatgagtcttatcaagataactgcgacgaaagattttcgaatccgggttactgaacagtttgtcaccaaataaccgtccaatggtatagttcactgcatcaccgacaatagcggcaatcaacataagcaccaccatcatatggacattgagatcgttagtttccagcgacgccaatgcaccagcaacaaacagcagcgaatcaccaggcaggaatggcgttaccaccagccccgtttcgcagaacagaatcaaaaacagaatggcataaacccagacgccgtactccgcgaccagctctgccagatgcacgtcaatgtgcaggataaaatcgatgaggaaataaatcaggtccatatttgcctatgccttgtactcgtcatctttcaggctgtaactacgttggctacagcctgaaatgttccgagcattattctcgttagtccgccagaaatagcgggcccattggcggttttggaagatcataccggtcagggtaatccaccgcgaccagatacagcccttccgcttttgccgttgctgccgccagcgttctgtcctttgccgccagcaactctgctatccagctctccggctggttgtgggcaccgacttccatcaggctgccgacaatattcctgaccatatgatgtacaaaggcattcgctttgatatctaccaccacataaggaccgtgacgcgtgacattaatatgcataacgttgcgccacggggttcgggactggcactgcaccgcacggaacgaggtgaaatcattctcgcccagcaagcattgcgcagcccgatgcatccgttcagcgtccagcggttcgtaaaaatgggttacccctttactcagtaccgccgggcgcagccgatgattgtagatgatgtagcgataacggcgagccgtggcgctaaatcgggcatgaaaatcatcaggtacagctttaacccaacgcacggcgatgtcaccaggtaaattcgcatttacgcccaaggtccacgccgcgtctttgcgctgcgcggtcgtttcgaaatgcactacctgcccggtaccgtgtacaccagcgtcagtacgcccggcnnnnnnnnnnatgggttcgttcgccacctgggagagcgccttttccagcttctcctgcacactgcggacttcattctgccgttgccagccgtaatacttactgccgtcgtactcaatgcccagcgcaattttataaactggcggttgttgctggtcggacattagtacagatactcctgcaccagtttctcggcgatttttactgccatcagcgcgccgccaaagcgaacgttatcggccaccgaccagaactggacttgctccggcataccgtagtcattacgcacgcagccaacagaaagatgcggcgtacccgaagcatcccctacctgagtcgggaattcgttctcttcagagagcacaatatcttcgccctgagcaaacacatcacacgcttcttctgccgccagcggacgcagtgcttcaaagttgaccatctgggcatgaccgtagaataccggtgcctggacgacgcttgccgaaatcatcagcccttcgtcctgcaggattttgcgtacttcgtcaacgatacgacgttcttcacgcacgctaccttcgctatccggcaacaacggcagcatattgaacgccagttgacgaccgaagaaatcttcttcgtcaatcggaatgccgttgagcaatttcgcactctgccccgctaacgcatcgaccgcttttttgccctgggcggaggctgaaatcaggctggtaacactgatacgcgacaaaccgccctgatcgattaacggtttcagtgccgccagcagctggctggtcagactgtctggtacggcgatgacattccggttgcggtaatcggtcagtacaaacgggtttacttccggcaccaccagcggtacgtcgggttcgagagcaaacagtccgctgctgtcgatcaccaggcaacctgagttggtcgcttcttcaacccaggcagcggtagcttctttgcctgcgacaaaaaatgccagctgcgcctgcgtccagtcgaattcagcggcatcctgcacggtgattgtcttaccaccaaagcgcagttgttcgcctgcgctttcgttacgtgccagtgcataaatttccccaaccgggaactgacgttcagccagcgtttcaagcagggcttcgcccacagcgccagttgcgcccaggacggcaatgttccagccttcagacatggtggtttactccagaaatagcaaagctccctgccaatgttacagcagagagcatgaagaagagattaacgtgccggatgatgaacggcgttaaaacccagtttacacagcaatgatgccgcactggcgtcatcacaaattacatacagagatgaccattcacggcgctcaagatagtttttgcgcagtttatcgaactcacccggtatcccggcgactttacgcagcggtgcgtcatcgcggcgcacatcatacaccaaatgcaccagccttttcagcgtcggttgatcgagcgggccatgcagcgtaatgcgaccaaactctggcgcgggcagtaatgtatccagcgcaacgtgctgttcatgcccaataaacttgctataggcttcaaacacttgcgtagtaccgcgtgctttaccttccagggtataacctgcgatatgcggcgtgccgatatccacttttgtcagcaactccacgttaagttccggttcgccttcccagacatccagcactacgcttaacttctggccttcattcaggcaggtcagcaacgcagtattatcgacgactgcgccacggcaggcgttaatcagaatcgctcccggcttcaggctacggatcagtttttcatccgccagatgcagcgttttgtacggcccatctttgaagagtggcgtatggaaagtcagaatatccgcatgctgaactaattcatccagcgagcggaaatcaccctcatccccacggtcagcgcgaggcggatcgcaaagcaaggttttaatccctaacgcttccagtcgcgcttgcaatcgacgtccaacgttaccaacgcccacgatccccaccgtacggtcgtgcagtgaaaatccatcgcgttcggcaagcatcagcagggaggagaaaacatattccaccaccgcaatcgcattacagccaggtgccgcggaaaaaccaattcccgcctgctttaaccatgcttcatcgacatggtcggtccccgctgtggcagtaccaacaaatttaatgggttttcctgccagcaaagattcattcactttcgtgaccgaacgcaccatcagcgcatccgcgtctgccagttgagcgacggggattggacgcccgggaaccgcggtcacctcacccaaacggctaaataagtcgcgggcataaggcatattttcatcaacaaggattttcacgtttgtgttacctgtatgagacgagagttaaccggacaagtgtgccataatctcgcggccaggcatacttgcgaagatttcaggtataaggatacgtaatgatacaacctatttccggccctcctcctgggcagccaccaggtcagggagataacctgccgtctggcgcgggcaatcagcctttatccagtcagcaacgtacttcgctggaaagcttaatgacgaaagtgacctcactgacgcaacagcaaagagcagaactgtgggcgggtatcaggcacgatattggtctgtcgggagattcaccgctgctttcgcgtcacttccctgccgctgaacacaacctggcgcaacgtctgctggccgcgcaaaaaagccattctgcccgccagcttttagcgcaattaggggagtatttacgtctggggaataatcgtcaggcggtcacggattatatccgtcataactttggtcagacgccgctgaatcagctctcaccggagcaattaaaaaccattctcaccctgttgcaggaagggaagatggttattccgcaaccgcagcagcgcgaggcgaccgaccgtcctttattaccggcggagcacaatgcgctcaaacagctggtgaccaaacttgcggcggcaacgggggaacccagcaaacagatctggcaatcgatgctggaactttccggggtgaaagatggcgagttaattccagcgaaactgtttaaccatctggtgacctggctgcaggcgcgccagacgttaagccagcaaaatacgccgacgctggaatcactacagatggcgctaaaacaacctttagatgccagtgaattggcggcgttatcggcatatatccagcaaaaatatggcctttctgcgcaatcatcgctttcttctgcccaggccgaggatattcttaatcagctttatcaacggcgggttaaagggattgatccgcgtgatatgcaaccgctgcttaatccttttccaccgatgatggacacgttgcaaaatatggcaacgcgtcccgcgctgtggatactgttagtcgcgattatcctgatgctggtctggctggttcgttagccccgacgaaatgacagtatcgtgacaataattcccagcaccgcagagatcgccccggcaagaaataccgaagagtaaccaaacgtggtcgccagcattcccgccagcggcccggagacgccgagggcgatatcctgaaacgcggcgtaaccgcccagtgcggtgccgcgaacttgtgaggggacgcgtttaaccacctccacgcccagcgcaggaaagataagcgaacatccggctccggttaacgccgcgcccgctaatgcgacccacgcccctggggcttgccagagcagcaacaagcccaccgtttctacaagcagagagacaatcgccactttcacgccgccaaaacggtccggcatccagccaaacatgacgcgcatcacgacaaatgcgccgccaaacgcggtaagagtaaagcccgccatcgcccatcctttgctggcaaagtagagcgaaacgaaagtcccgataaccgcaaaaccaacgccttgtagtgccagccctaaccctggtttccagataagcccgacaacgctccacagcgatggacgttctcccgccaaggccggtactttgcgcactgtgccgttacaggcccatgccagtaagggtaataccattgtggtgatcgccagtgcggcaaaaccgtaatggctatgaatcaacaggccaagcggagcaccaacagcgagggcaccgtaaatcgccattccattccatgacatcactttgccagagtgttttggccctacgatgcctaacccccaggtcagagcgcctgtcagtaactggctttcaccaaagccaagaatcaaacgcccgacgaccaacagggcaaatttgaacggtgcggagacaggcaaaatcgccgccagcagcaacgcgccgccagccagaccacaagctaacatcccctgaagcgccgaacgttttgcaccatattgatcggccagtcgcccggcatagccacgcgtcagcaccgtagccagaaactgaatcccgacggcaatcccgaccatggtattgccatagcccagatcatgatgaacaaacagcgggataaccggcaacggcagccctacggtcatgtaggtgagaaaaaccgcaaaagcgatgcggaagagcgaaaaattggcagaagatcgtgtttcggtttggcttacagcagtcatgcattactccagaatgcagcgcaaggcgaggagtatccccgtctcatctctctggtttcagggttacggtgcgttggcaggatttaacgcgtacgtcttttcagaaggaaatcgacaaagcgggaagtttgcctggaacaggcggcgattgtcaatgatgtgaaaaagggaaccatcaggttcccttttgcgttagtgccggaggccgcattagcgcgtaacgtcggatgcgacgctggcgcgtcttatccgacctactccgactactccgacctactgcgaattaatctttcagcttgcgcattaccagcgtggcgttggtgccgccgaagccgaagctgttagacataacggtagtcagttcgcgatcggtcgtttcggtcacgatgttcagacccgcagcctgctcgtccagctcttcaatgttgatgctcggggcgataaagccgtgttccagcatcagcagagagtagatagcttcctgtacgccagcagcgcccagagagtgaccggtcatggctttggttgcagaaatcgccgggctcttatcgccgaacacttcacggatagctgccagttctttcacgtcgccaaccggagtcgaagtaccgtgagagttcaggtaatcgattggggtatcaacgccatgcatcgccatctgcatacaacgtactgcgccttcgccagacggagcaaccatgtctgcaccatcagaggttgcgccgtagccaacgatttcagcatagatgtgagcaccacgcgccagcgcgtgttccagctcttcaaccactaccataccgccgccgccagcgataacgaaaccgtcacggtgagcgtcgtaagtacgggaggctttttccggggtgtcgttgtatttagtagacagcgcacccatcgcgtcgaattcgcaggccatttcccagcacagctcttcgccgccgccagcaaacacgatgtcctgtttgcccagttggatctgctctactgcgttaccgatacagtgtgcggaagtcgcacacgcggagctgatggagtagttaacgccatgaattttaaacggcgtggcgaggcaggcagaaacgccggatgccatcgctttggtgaccacatacgggccaaccgctttcaggccgcgcgggccgcgcattgcgtcagcgccgaatacctggaaacgcggggaaccgccgccagaacctgcaatcaggccaacgcgcgggttattctggtaagcttccggagaaaggcccgcatctgcgattgcctgctccatagaaaggaatgcataaatggatgcgtcgctcataaagcgcacaactttgcggtcaatgaggccagtggtatccagttttacgttgccccagacgtggctacgcatgccggaatccttcagctcctgagagaaagtgatccctgaacgtccttcacgcagagatgccaggacttcctgctggttattaccgatgctggaaacaatgcccaggccagtaatcactgcacgtttcattcaatacctctgtaagtcgcacatagagtaagtttcgaatgcacaatagcgtacacttgtacgccgaacaagtccgatcagccatttaatagagaaatttgcgcagccttacacacatcgctaagatcgagccaccgcctgtaagacgagtaacttacgtgaaacactactccatacaacctgccaacctcgaatttaatgctgagggtacacctgtttcccgagattttgacgatgtctatttttccaacgataacgggctggaagagacgcgttatgtttttctgggaggcaaccaattagaggtacgctttcctgagcatccacatcctctgtttgtggtagcagagagcggcttcggcaccggattaaacttcctgacgctatggcaggcatttgatcagtttcgcgaagcgcatccgcaagcgcaattacaacgcttacatttcattagttttgagaaatttcccctcacccgtgcggatttagccttagcgcatcaacactggccggaactggctccgtgggcagaacaacttcaggcgcagtggccaatgcccttgcccggttgccatcgtttattgctcgatgaaggccgcgtgacgctggatttatggtttggcgatattaacgaactgaccagccaactggacgattcgctaaatcaaaaagtagatgcctggtttctggacggctttgcgccagcgaaaaacccggatatgtggacgcaaaatctgtttaacgccatggcaaggttggcgcgtccgggcggcacgctagcgacatttacgtctgccggttttgtccgccgcggtttgcaggatgccggattcacgatgcaaaaacgtaagggctttgggcgcaaacgggaaatgctttgcggggtgatggaacagacattaccgctcccctgctccgcgccgtggtttaaccgcacgggcagcagcaaacgggaagcggcgattatcggcggtggtattgccagcgcgttgttgtcgctggcgctattacggcgcggctggcaggtaacgctttattgcgcggatgaggcccccgcactgggtgcttccggcaatcgccagggggcgctgtatccgttattaagcaaacacgatgaggcgctaaaccgctttttctctaatgcgtttacttttgctcgtcggttttacgaccaattacccgttaaatttgatcatgactggtgcggcgtcacgcagttaggctgggatgagaaaagccagcataaaatcgcacagatgttgtcaatggatttacccgcagaactggctgtagccgttgaggcaaatgcggttgaacaaattacgggcgttgcgacaaattgcagcggcattacttatccgcaaggtggttggctgtgcccagcagaactgacccgtaatgtgctggaactggcgcaacagcagggtttgcagatttattatcaatatcagttacagaatttatcccgtaaggatgactgttggttgttgaattttgcaggagatcagcaagcaacacacagcgtagtggtactggcgaacgggcatcaaatcagccgattcagccaaacgtcgactatcccggtgtattcggttgccgggcaggtcagccatattccgacaacgccggaattggcagagctgaagcaggtgctgtgctatgacggttatctcacgccacaaaatccggcgaatcaacatcattgtattggtgccagttatcatcgcggcagcgaagatacggcgtacagtgaggacgatcagcagcagaatcgccagcggttgattgattgtttcccgcaggcacagtgggcaaaagaggttgatgtcagtgataaagaggcgcgctgcggtgtgcgttgtgccacccgcgatcatctgccaatggtaggcaatgttcccgattatgaggcaacactcgtggaatatgcgtcgttggcggagcagaaagatgaggcggtaagcgcgccggtttttgacgatctctttatgtttgcggctttaggttctcgcggtttgtgttctgccccgctgtgtgccgagattctggcggcgcagatgagcgacgaaccgattccgatggatgccagtacgctggcggcgttaaacccgaatcggttatgggtgcggaaattgttgaagggtaaagcggttaaggcggggtaatctgctctcgcagtgtttaccggatgcggcgtgaacgccttatccgacctacgtgtgacgtgtaggcctgataagacgcgataagcgtcgcatcaggcatggtgctccagacgccgcaacttactgctgtgacgcctgctgaaacaggttttcccacatatcggtcaccagcgcctggtcacgcggcgacaattcaccggcaccaatggctttttccagactctggctaacggtcgtatgcaccgcctgagcggagtggtcatcaccactttccagttctgcgatggctaatgtcaggtggccacgcaaatacccactggcaaacaactcatcatcactggcatggtcaaccataccgtcgattaatgccagaatgcgtgattcaaactccgcgatcatcttctttcctcattgtaaaacgtggcgctggctttagttgagcgcttccggccacgggaactgttccgccgtaagttccggcgtgtgataataattttgtagtgctttaatgaagcgtgccgggcgttcaggaatgccgtttgctaggtaatccatcacctgcgcatgtacccgccgttgaaacaccacacgatccggttcgaagtcgccttccagattgtcgcaactgacgttaaacggatatcccgccgccacacagaacaaccagtcgagtgcctgcggcttcacttcaacatcttcaaactggctttgcgtttgggcatcacgcccatccgggcaataccagtagccgaaatcaaccagctcacggcgcgcttttccggcaatacaccagtgcgaaatctcatgaattgcgctggcataaaagccgtgggcaaagacaattcggttatacggtacttccgcatcagcaggaagatagatcggttcgtcgtcgcctttaatcagacgggtattaaattcatcggcaaagcagctattaaaaatttcaatcaactgctcatagtggtgtgtactgttcattagttcatccccaaccagtggaggatctcctgtccgtggctatcgtaaagtaatttggcactcatcaccgccgagacgataacaatcatcgggcggatcagcttttgtcctttgctcaacaccagccgtgaacccatgcgcgcgccgaggaactgccccaccagcatgacaaagcccgtcgcccaaatcactttgccgccgagaataaacagcagcagaccgccaatgtttgacgttgcgttgagtaatttggcgtgagccgtggctttggcgaggttgaatccgcacagcgtaacgaaggccagcgcgtaaaacgatccggcagccgggccaaagaatccgtcataaaaaccgacgcagccaccggcaattaacgcgaagggtaaaccgtacatccggcgctggcgatcttcttcacccagctttggcatcagcaagaaatagaggccgatacaaatcaccagaatgggcaaaatctgccgtaagacatcagcctgaacgtactgtaccaacagtgcgccgctcattgagccgacaaaggtcatggcaatattgagtttctgatcgcttaaactaaccactttgcggcgaataaagtagatagtggcggaaatagagccgccgcaggcttgcagtttattggttgccagcgcattagcgggagacatccccgctgccatcaatgccggaatggtgagtaacccaccgccaccggcaatcgagtcgataaatcccgccagcatggcgacaaaaaagagaactcccagcaacagcggggaaaccataaacaggctattaaacgtttccattagatcacgtgctcatccagtagcgcctggcaggaaggcggcaacggaggcggtgtcttcttctcaggctttgttgttcccggttttggaggtgcaaaccagctttgcagttctgccccgcaaccatcgcctggtggcggtaaaggttgatcttcacactccagactatcggcaggacaacgtaatcgtacatgcatatgcgcgcgatgctggaaccagggtcgcactttgcgcaaccagtcgcgatcggtgcccgcatcaaggcaaagttgttgtttaatcgccggattaacaaaaatgcgtgtgacgtctttgtcctgggcggcgagtttgatcaagctgaaaatttctggcttccacagcgtggagacaacgtgtttaccgtcgcgggaaactaagtccagtgcttgcgggcgcaagagctgcgcggaggtccagcgagttttcggcagttgcagaaagatatcgacatccagtccggtctggtggctggcatgaccgccgttgaaacgcccaccagcgggcatccccatatcgccaatcagcaccgtacccatgcccagattgctcacctggctactcagacgctggataaacatcaccagatccgggtgaccgaaatagcgacgctgatcggtacgcatgacctgataatgttcggactgtatcggcagcgtgtcagcaccgacgatacagccattagaaaaactgcctatcgattgtgcgctacccggcacaggttgggttattttttgccacggcgtcgctgccaggctagcgctactggcaagcagagccagcagcgcaatcgcggttttgttcattttttaccagcgtggaatatcagtcttcacatcggcattttgcgcccgctgccgtaacaggtgatccattaaaacgatcgccagcatcgcttcagcgatcggcactgcacggatcccgacacagggatcgtgacggcctttggtgatcatctcaacttcttcgccaaagcggttaatagtgcgccccggcacggtaatgctggaggtcggtttcagcgccatatgagcaatgatttgctgcccgctgctgataccgccgagaatgccgcccgcatggttgctctggaaaccgtctttggtgatttcgtcgcggttctggctgccgcgcagcgccactacgtcaaaaccgtcgccaatttccacgcctttcaccgcgttgatgctcatcagcgcatgggcgatgtcggcatccaggcggtcaaagaccggctcgccaagtccggcggggacaccactggcaacaacggtgactttcgcgccgatggagtcgccctcttttttcagcgcgcgcatcagttcatctaacgcgtcgattttgtcggggtccgggcagaagaacggattttgttcaaccagcgaccagtctttgatttccagcggaatgtcgcccatctgggtcaagcagccgcggatttcaataccaaatttctcggcgagatattttttggcaatcgcccctgccgccacgcgcatggcggtttcgcgggcggaagaacgtccaccgccgcgataatcgcgcagaccgtatttttgttcgtaggtgtaatcagcatggcctgggcggaaaacgtctttaattgcgctgtaatcctgagagcgctggtcagtgttttcgatcaacaagccaatgctggtgccagtagtaacgccttcaaaaacaccggagagaattttgacctgatccggctcgcggcgctgggtggtatagcgcgatgtcccagggcgacgacggtcgaggtcatgttgcaggtccgcttccgtcagcggaatgcctggcggaacaccatcgacgatgcagccgagcgccagcccatgcgattcgccgaaggtggttacgcgaaagagttgtccaattgtgtttccagccatcacggctccgttattgttgtgtttgcgtgtttacttaatctttataaatcgcgaaatattcacgggccgccagcagctgctctttggtgagcataaacacaccatcgccgccgttatcaaactccagccaggtgaacggaacatccggatattgttccataagatgtaccatgctgttgccgacttcacaaatcaacacgccatcatcagcaaggtaatctgccgcgtttccaagaatgcgacgtgtcagtttaaggccgtcggtgccagatgccaggcccagttccggctcgtgacggtattcgtttggcaggtcggacatatcttccgcgtcgacatacggcgggttagtgacaatcagatcgtattgcactttcggcaaatcacggaacagatcggaacgaatcggaatgacgttgtggatcagaccgtgttcttcgatgttctgttcggcaaccgccagcgcgtcgggagagatatctaccgcgtcgacttccgcttccgggaaggcataagcacaggcaatggcgatgcagccgctaccggtacacatatctaaaatatgctgcggttgcttgctgatgagtccggcaaatttattgttgatcagttcaccaatcggcgagcgcggcaccagcacgcgttcatcgacgtaaaattcatgaccgcagaaccaggctttgttggtcaggtaagccaccggaatgcgctcgttgacgcggcggatcacgcgttcaacaatacggtgtttttcgctggaggtcatacgcgcggtgcgcatatcttccgggatatccagcggcaggtagagcgatggtaacaccagctgtacggcttcatcccacgggttatcggtgccgtgaccgtaccagatatttgccgcgctgaagcggcttaccgaccagcgcaacatgtcctgaatggtttgcagctcatttactgcttcatcaacgaaaattttatccacgtattcctccagggcatgatcgcaataatttcggcggctagtttgccatgaagatgacgataaatcagcattcacgcgcggtgagtgaggaaaaatacgtttaaaacgatcgattgtgctacgagtcgggtaaactgtaggaaaattagaaatagagacagataaatgaaaaagaaaacaacacttagcgaggaggaccaggctctgtttcgccagttgatggcggggactcgcaagattaagcaggacacgattgtccaccgaccgcagcgtaaaaaaatcagcgaagtgccggtgaaacgcttgatccaggagcaggctgatgccagccattatttctccgatgagtttcagccgttattaaataccgaaggtccggtgaaatatgttcgcccggatgtcagccattttgaggcgaagaaactgcgccgcggcgattattcaccggaattgtttttggatttacacggtctgacgcagctgcaggccaagcaggaactgggcgcgttgattgccgcctgtcgccgcgaacatgtgttttgtgcctgcgtgatgcatgggcacgggaagcatattttgaagcaacaaacaccgctgtggctggcacaacatccgcatgtgatggcatttcaccaggcaccgaaagagtacggcggtgatgcggctttgttggtgttgattgaagtggaagagtggttgccgccggagttgccctgaatgctggcagcaaatgccggagcagcgtaaacgccttatccggcctacaaatatgtgataattcaataaattgcaattcacttcgtaggcctgataagacgcatcagagcaatactacgaactacagttcattcaatacatactgaaaacgacacgtcgaatcaatcggttgcccactactggtattcacattcaccacaatatcgtgtagtactttatccgttaccggatgacgagttggcgtaaccgttaccgttgatttatcacaaccgtaagaggtaaaggttaacaattctgataccgcgcggcagtatgctcctctgccatcattatcagaaaaattactgccatcacagagtctgccgccttccatcaagtaggtcgaaagcgtggtggtcactgttgaccccgtggactgaattcgtaacgccttattatggctgacataattttcactccaggagatatcgtatgaagcgaccggtatcgttgggcatattgtgttatgcactgtaggggccgtatagcttccaaatccgggtaaatctgtataggaataaaaggatgcgatccaagggcaaccataatcatcagatgcaacggtaattttaaacgtcatatatgcacaacgaaaaattttcgtatctatgccagggcaatttgagttattaattgtatcaaagtcagtcagtaccaaagttggagctgaacccgacccagaccaggaaataacccgcaacgtatcgcctttatacgcaaaagaatcatatttcccatatgcaacctcctttggcgttatcaccgtaacattgaaaacactgctcgctacagcaccggttaccttgtccatggcataataaactctcacactgtcaaaactcgcactcataagtttatctccagcataactcttagatgcgccgacaacactcagaacgagcagcattaggctcgcgaaaattatggtccattttttcatttcagaaatactcaaaggttgccgtcactgtggcactaaagtctccggacgttacatctcgcccgctctttgcctgtaaccaggtattaaaatttaggctgttatttccctgattcagcgggagcgtgacgcctgttgtattgttgattggcaccgatgtgcctgccgcagtttcaataccaatcccagcgccggatgctgatgacgaggagtcaaaggccagaaagccgggtagagcactatcttctgttcctgtcaacgttactttgacattaaacaatgtagaactatgacaatctttcaattgaaacaccaatggcactcgctctgactgcccaaggttcattaaatcgctggcggcaatggcaggaaaatgtacttctgccaactggctaccattaatcactggcgtacacgatttactgattaaattgccggtaaagtgcaaattatctcctgctattgtggttccactgcccagcaacatcaggctactaataaaaaacaacgtacgctttttcttcattggtaatctacctgtaacgtggcccaggcctcaaagtccgcctctggcagaacgacaccactcttttttactggcacagccgttaacaccggtaaatcggtttcattcaccacaagtggcgtattgatcgtaaaactctgccctgcctgtttgagctgaatgcctaaaccagtgatattgctgcttactgcagcattatcaaaatcgcttggtgtgccactccagctcaaggtcatttccattaatgggtcgcgaaccgccgtatcgcaggtaatggaatacggcacggtttgctcataattgctgccattaatgtcatcaataagcacatcctgaaaagttatttcaatggtttgagcgttgctaatcgtgcagttaggtggctgcactaaataaccgtgaaaagagacgtttgagagtgccatcgagcaaaagccccacagcaaaataagcgagatccgtttcattggtaatccaccacaattgtggcactggcgttaaattcagctgccgctaacgttgtaccactctgtttcaccggcacagcttccagaacgggaactcccgaggaaaaattaaatggcaaccatgagccagaggttaagtcgagtattgtgtgatcactacttttctgaacccgaataccaaacccaggaatccccgtgctgataactgtttcaccgttaatcacgaccgttgtcgcctgcatctgtagacgcaggtcatccattgccagattgttacaaacaagcgagtagtcaatgggacgtttataatcaaccccattgatcttattaatgaatacattaccaaactcaactgccgcaccatttaccgtacaaggaggaggggcatcgacaagcacccgtaaattcatacttactgacttactcgctgcaactgcaaagccgctaccaacacaacatatcagtaacccagttaccgcccagacagaacaagatcctttcatactggctctcccggcctcagcctttgcggctctgctcttcatcgacctggcaactgttaccgttgcaagtgaaaaagagcggcatccgagcgccatagtcgttgacataggtcagtaccggcacgctacccatcttcacattcagcggtgcagaggttttcggcgacatcactattggcgagaaaccggctgccggattgccatttttctgtgtgctggcattactgaaaatgacgtaatacggtgtcgggttattgacggtaaattcctgaccgttgcgggttaaagtaaccttatattgccaggggtttttcatgctgacgttctccagcgccttcggtcgccagaacaacttaatacgcgtttgtagtgctatttgcagcgtgttggctttgtttgattttggcgggatctcacgcacgttgaagtagaacaggctttcacgatcggcaggcaatttgttgatatccggcattccctgcacttttacctgcccgttcatcattgaatcgatgcgttgcaccggtggcagaacagttaacggtgaactgatcttgttacccttttcatcttcgatccagctttgggccagataaggcagtttcggatcgttattgcgcaacgtcacgctgattgatttgtcgctttcattaaatatcaaacgggtacgatctggcgttacagaagcctgggcagacaaactggcagcgctaagcagtaacgctagcgtcgtagcacccaatttggcagagcaaagtaaatcagacatggatcattccttaatcacgttattggttagctgaaacagaaacagggggattggtgggtgtcacctgttgcgtctgctcctgaatgacaggctttatgtcatcaggaacaaccggcgcgacgttgcctttatgctggcatggcagtaacaagccgttaaacagatcggcaggcagcgggtccggcaggttgatatcgcaatgcgcaacaccactccagaacacactcatgtgttcgccaggtttcaccccagccagataaacattgccgtcatcatcgacaaggcccactgtctgctcgttatcattttttacttctgcgccaaacggaggatggctgccgtcttgtaaacgcagcaccgccatcgctttttgaccactgatgacggcaaatttgcggtagccaatcgccccttcagttagcgtggcttgtaccaccgactgggttgcttcggcgttttccggcagtttgttgaggtcgatatacgcctgattgcggtaatagttattgacgtcagaaacgacggctttaccaaacatattggtataaacagcagcaccgttaccttctaccggaacatcggcaacgccatcggcatcaatcaacaagcgtgtcccgcccatattctgggtacggtgaagtgcgccaccgtgggcagtaagcgttgcgccgccctgtaacgacaagcccgcagaggtgtattgcccttcatggtagttcgcgctgaggtcaacctgcgccagcgaaccatcatggctgtaatagccgtcaacgctggtgtgtttgtcactggtgccgacgttcaactgatagtgagtcgcgtcatcgacacggctgaaataaccgacctgactgctgtccgtcccactgccatagttgccgttatagctaacggtactgttgtcgccccacggcatactgagcgaaatgtacatgcccttatccgcccggttgtcatactcgtagcggtagccagtcagggaaacgctcatattacgaatgctgcccatattgaaatagtgggagagcatgatgttgtagtttgtctgctcctcacgatcccagtaagtatggcgggtatagttgagataaaccgaaacacccgcatcgcggaagttctggttataagtggcggtgtacatctctttgtcgttgcccgtgcgtaccattccgctgtcactggcatccagatactcgctcatggtcataaagttctcttccgagaagcgatatccagcaaaagtaacgcggctgttgagctggtcaaagtctttggaataactcacacggaaggagttaccgtccagcgaacctttgccataagcggtgtctttatccagtttggtgtgcgagtgagtaacatcaaacgcgaccgcgccgaacgtagacaaatcgcgaccaacgccaagtgcggcagattggtagttttcatcccccagcgcgccaccatagagcgaccaaccattagcgatcccccaggaagcttcagcaccagagaaaaattcgccttcaacatgatgcccccactcttgcggacgacccatcatgatcttatagcgcacctgacctggacgagtgaggtatggcatcgaggcggtgctgatgtcatattcctgcacctggccgttctgttcttcaatgcgaatatgcaacgtaccggagacagaatcaccaagatcctgaatacgaaacggtccagccggaacctgcgtttcgtaaatcacacgccccatctggctgacggtcacttttgctgtggtgtgtgccacgccggaaatgtctggcgcgtagccgcgcaggttgggaggcaacatttgatcgtcagtgctgacactgccaccaacataattaaaaccgtcgaaaatatcggaattgaggtaatcttcgcccagcgccagtttggcttttaatgacggtaacgcccgccaggcataatagcgactccactcccattttttttgtgtgtcatcgccgctaaattcctcgtcatcatcattactgcgggtatgttgatagttggtctgccagtcagcgcgcatacgccatggccccaggttaaccccgaccgtcccgttgccgctgatctcgttactatcatcaccgccattttcttcgtgccgggtttgtgcgttgatgctgtagtccgcgacgatcccggagatgccgtcatcccaacgtgaaggcggatcccagtcgggataagtatattcgaggtaagcctgtggcagtgaaatgactaatgcggactggcttaaatcagccttaatttccatgccttccagttgaccggatttcaggcatttagcatcgtggctccattgcagatttttcgccacgtcttcttttaaaccaaactgcgctaccagttccggtgtcagacaagcatagcttttgctcgcgtcatcttcaccagcataccagtaaatatcgtactcttccgccaatggctgtttatttagttgaacctgtaaattgtattttccgggctcaacatatccctggctggaaaaacgcttcagatcaatttttgtgtcgccttttaattccagaaaacgggaatcaaactgaatgtcgtcttcagcccagacactgctataactccctgacattgccagcgcaatgcaccacggaagaatccgtaatcgaaaaagagaatggtcaggcatacacgtttctatccgtttttattcttgttcggtcaaaatccatttaaatcccccatagtagtgtcgctatgggggtatgccttacaggtaagtaatctggaaggtggtatttgcttcgaaattacccagatctggcgcatcagctgcgccgaccagccaggctttaaagttcagtgtctgcttcgctttgcctttattggtagaagtgtctttcactattttctggtcaatacccatgccgcttttgtaagaggtacccagagagtcaccgatcgccaggctaacattgttaaatgccgcaccggtatcggtattgaaaatggtgtaataattgccgctatttgcagaagaaacggtaccagtaaaggtagtagtcattgtttcctgagtatcaaatacgcaatcttgcagacgaatctggaaacttttcggcgtggtggtgccgttatttttcagtttttcggcaccgatatcacctatatcaacttccagtttgtgatcgtccggaacgatagaacacactgagtcttcaatggtgccgtaaaagcgtgcagtaccgttgttacccgcagcgattgttgccgtagaggtgaacacgcccatcaccattgccgcagcaatagctgttttaacaaacttactcattatttgtccttaaactataaataattaaaaatataaacattgcaatacattgattcagtcaatagccaatgtttatacccagccattgaatacggcatgcgatccaaaaagaacaggtcgtagaaaattgtattcgttggtgtggggccgcatagtgatgtttccacacccctgatgcaatttaattttactaaagagtaaatgtagatttaatta

SEQ ID NO: 218 - DNA, 25628 bp, Escherichia coli
  source 1..25628: mol_type = genomic DNA
aaaaactggatcgacaaagaagaatatccgcaatccgcagccatcgacctgcgttgcgtaaatatggttgccgatctgtggcatgcgcctgcgccgaaaaatggtcaggccgttggcaccaacaccattggttcttccgaggcctgtatgctcggcgggatggcgatgaaatggcgttggcgcaagcgtatggaagctgcaggcaaaccaacggataaaccaaacctggtgtgcggtccggtacaaatctgctggcataaattcgcccgctactgggatgtggagctgcgtgagatccctatgcgccccggtcagttgtttatggacccgaaacgcatgattgaagcctgtgacgaaaacaccatcggcgtggtgccgactttcggcgtgacctacaccggtaactatgagttcccacaaccgctgcacgatgcgctggataaattccaggccgacaccggtatcgacatcgacatgcacatcgacgctgccagcggtggcttcctggcaccgttcgtcgccccggatatcgtctgggacttccgcctgccgcgtgtgaaatcgatcagtgcttcaggccataaattcggtctggctccgctgggctgcggctgggttatctggcgtgacgaagaagcgctgccgcaggaactggtgttcaacgttgactacctgggtggtcaaattggtactttcgccatcaacttctcccgcccggcgggtcaggtaattgcacagtactatgaattcctgcgcctcggtcgtgaaggctacaccaaagtacagaacgcctcttaccaggttgccgcttatctggcggatgaaatcgccaaactggggccgtatgagttcatctgtaccggtcgcccggacgaaggcattccggcggtttgcttcaaactcaaagatggtgaagatccgggatacaccctgtatgacctctctgaacgtctgcgtctgcgcggctggcaggttccggccttcactctcggcggtgaagccaccgacatcgtggtgatgcgcattatgtgtcgtcgcggcttcgaaatggactttgctgaactgttgctggaagactacaaagcctccctgaaatatctcagcgatcacccgaaactgcagggtattgcccagcagaacagctttaaacatacctgataacgtttaacggtaacggtgtcccgaaacgaacccgtttcgggacaatttccaaagtctgttcactggcattagcaacggaaaatattgttctgaatacgcttcagaacaaaacaggtgcggttccgacaggaataccgttttagggggataatatggctacatcagtacagacaggtaaagctaagcagctcacattactcggattctttgccataacggcatcgatggtaatggctgtttatgaataccctaccttcgcaacatcgggcttttcattagtcttcttcctgctattaggcgggattttatggtttattcccgtgggactttgtgctgcggaaatggccaccgtcgacggctgggaagaaggtggtgtcttcgcctgggtatcaaatactctggggccgagatggggatttgcagcgatctcatttggctatctgcaaatcgccattggttttattccgatgctctatttcgtgttaggggcactctcctacatcctgaaatggccagcgctgaatgaagaccccattaccaaaactattgcagcactcatcattctttgggcgctggcattaacgcagtttggtggcacgaaatacacggcgcgaattgctaaagttggcttcttcgccggtatcctgttacctgcatttattttgatcgcattagcggctatttatctgcactccggtgcccccgttgctatcgaaatggattcgaagaccttcttccctgacttctctaaagtgggcacactggttgtatttgttgccttcattttgagttatatgggcgtagaagcttccgcaactcacgtcaatgaaatgagcaaccccgggcgcgactatccactggctatgttactgctgatggtggcggcaatctgcttaagctctgttggcggtttatctattgcgatggtcattccgggtaatgaaatcaacctctccgcaggggtaatgcaaacctttaccgttctgatgtcccatgtggcaccggaaattgagtggacggttcgcgtgatctccgcactgctgttgctgggtgttctggcggaaatcgcctcctggattgttggtccttctcgcgggatgtatgtcacagcgcagaaaaacctgctgccagcggcattcgctaaaatgaacaaaaatggcgtaccggtaacgctggtcatttcgcagctggtgattacttctatcgcgttgatcatcctcaccaataccggtggcggtaacaacatgtccttcctgatcgcactggcgctgacggtggtgatttatctgtgtgcttatttcatgctgtttattggctacattgtgttggttcttaaacatcctgacttaaaacgcacatttaatatccctggtggtaaaggggtgaaattggtcgtggcaattgtcggtctgctgacttcaattatggcgtttattgtttccttcctgccgccggataacatccagggtgattctaccgatatgtatgttgaattactggttgttagtttcctggtggtacttgccctgccctttattctctatgctgttcatgatcgtaaaggcaaagcgaataccggcgtcactctggagccaatcaacagtcagaacgcaccaaaaggtcacttcttcctgcacccgcgtgcacgttcaccacactatattgtgatgaatgacaagaaacactaaccatgtctgaatggttataagacaagggagcgataagtcatcgctccctttttcgtgcttgctgtcgtattgacttaaccgggataagtacgagaatgagcgcacatctgtttaccggaaaccagcacatatggatatctgctcccgaaacaagaaattaacgattagaagaccagcgatactagttgcactggcacttttactgtgtagttgtaaaagcacgcctccagagtccatggtgacaccaccagcaggttcaaagccaccagccacgacgcaacaatcgtcacaaccgatgcgtggcatctggctggccacggtttctcggctcgactggccaccggtttcctcggttaacattagtaaccccaccagccgggcccgtgtacaacaacaggcgatgatcgacaaactggatcatctgcaacgtctcggcataaacacggtctttttccaggtcaagccggacggtaccgccctgtggccatcgaaaattttgccgtggtccgatcttatgaccggtaagattggtgaaaatccgggttacgatccgctgcaatttatgctcgacgaagcccacaagcgtgggatgaaagtacacgcctggtttaacccctatcgcgtatcggttaatacgaagcccggtactatcagggaactgaatagcactctgtctcaacaaccggcgagcgtctatgtgcaacaccgcgactggatcagaacgtctggcgatcgctttgtcctcgacccgggcatccctgaggttcaggactggatcacatcaatagtcgcagaagtggtttcccgctatcccgtagatggcgtgcagtttgacgactatttctatacggagtcaccgggttcacggctaaatgataacgaaacgtaccgtaaatacggaggcgcatttgcgtcaaaagcagactggcggcgcaacaatactcagcagttaattgcaaaggtatcgcacaccattaaaagcattaagccgggagtcgaatttggtgttagcccggcaggcgtgtggcgtaaccgatcacacgatccgctcggttccgatacccgaggcgcggcagcctatgacgaatcctacgctgacacccgtcgatgggtggaacaaggattgctggattacattgctccccaaatttactggccgttctcacggagtgccgcgcgttatgacgtgttggcaaaatggtgggcggatgtcgttaaaccgaccaggacccgcctgtatatcggtatcgccttctataaagtgggtgaaccctcaaagatagagccagactggatgattaacggcggcgtaccggaactgaaaaagcagctcgatcttaacgatgcggtaccagaaattagcggcaccatcttgttccgtgaggactatctgaataaaccgcagactcaacaagcggtcagctatctgcaaagtcgttggggcagttaaactcccattcttactttgtaacaagccggtgctttacccaccggcttgttaccctcttgaactatcccactactaatcatgcttactaaagtcaaattaaccacgcaattaaccacacttagttaaacagccataaatcccctaataaaaatgtatgaatatgaaaaaacatacgatattcgctgtcaccgaaaaataattacgatgggctatactcttctgaagaacagtagcgtagattaaaactgtcctaagtcgcttatttcttttcagtatatcttcatatttcaggagaatatggtgcagttagtcgatctcgcacgttgcgtttcgttttgattccgtctgatttcccagccttataagggtgtgaattatggagatgtattttaaaagaatgaaagatgagtggaccggacttgtcgaacaggcagatcctctcattcgtgctaaagccgcagaaattgccgttgcgcatgctcattatctgagtatcgagttttatcgaattgtccgcatcgacccgcatgccgaagaattcttgagtaatgaacaagttgagcggcagttgaaaagtgcgatggaacgctggattattaacgtgctttctgcccaggttgacgatgtcgaaaggctaatacaaatccagcataccgtcgcggaagtgcatgcccgcataggaattccggtagaaattgtcgagatggggtttcgggtgctgaaaaaaatcctctatccggtaatcttctcttcggattattccgccgcagaaaaacttcaggtctatcatttctcgattaacagtattgatatcgcgatggaagtgatgacccgcgcgtttacctttagtgacagtagtgcctcaaaggaagatgaaaactatcgtatcttctcgttgctggaaaacgccgaagaagaaaaagaacggcaaatagcctcaatactttcatgggaaatagatattatctataaaatcctgctggattctgatttaggcagtagtttgcctttaagccaggctgattttggcctgtggtttaaccataaaggtcgacattattttagtggcattgccgaagtaggccatatctcccgtctgattcaggatttcgacggtatattcaatcaaaccatgcgtaacaccaggaatctgaataacagaagtctgcgggtgaaatttttattacagataagaaatactgtatcgcaaattattaccttgctgcgtgaattgtttgaagaagtatcgcgccacgaagtcggtatggatgtactgacgaaattacttaaccgccgtttcctgccgactatcttcaaacgcgaaattgcccatgccaaccggaccggtacaccgctgtcagtgctgattattgacgttgataaattcaaagagatcaacgatacgtggggccataacactggcgatgaaattctgcgtaaagtctctcaggccttttatgacaacgtccgcagtagtgattatgttttccgctacgggggcgatgaatttatcattgttttgactgaagcttcggaaaacgaaacgttacgtaccgcagaacgtattcgcagtcgggtggagaaaaccaaactgaaagccgcaaacggcgaggatattgccctctcactttccatcggtgccgccatgtttaatggtcatcctgactatgagcgcctcattcaaatagccgatgaagctctgtatatcgccaaaagacgaggtagaaaccgtgttgaactctggaaagccagtctttagatgcgccaggatgcagaggtaatcatgaagctaaccgatgcggaaaatgccgccgatggcatttttttccccgcccttgagcaaaatatgatgggtgcggtgttaattaacgaaaatgatgaagtgatgtttttcaaccccgccgcagagaagctctgggggtacaaacgtgaagaagtcattggcaataacattgatatgctgattccgcgggatttgcgtcctgcgcatcctgaatacattcgtcataaccgtgaaggcggtaaaacgcgcgtcgaggggatgagtcgggagctgcagctggagaaaaaagacggcagtaaaatctggacccgttttgcgctatcgaaagtgagcgccgaggggaaagtttattacctggcgctggtacgggatgccagcgtagaaatggcgcaaaaagaacagacccgacaattgattattgccgttgaccatctcgaccgaccggtgattgtcctcgatccggaacgccatattgtgcagtgcaatcgcgcatttaccgaaatgtttggttactgcattagcgaagccagcggtatgcagcccgatacactcctgaacattcctgaattccctgccgataaccgcattcgtttacaacagttgctatggaaaaccgcccgcgatcaggacgaatttctgctgttgacgcgcaccggtgaaaaaatctggattaaagcctctatcagcccggtttatgacgtgctcgcgcatctgcagaacctggtaatgactttctcggatatcaccgaagaacggcagattcgccagcttgaaggcaatattctcgccgccatgtgcagcagcccgccatttcatgaaatgggggaaatcatttgtcgtaacatcgaatctgtactcaacgaatcgcatgtttcgctgttcgcactgcgcaacgggatgccgatacactgggcgtcatcttcgcacggtgcagaagttcaaaatgcgcaaagctggtcagcgaccattcgtcagcgtgatggcgcgcctgcggggatcctgcaaattaaaacctcgtcaggagcagaaaccagcgcctttatcgaacgcgtggcagatatcagccagcatatggccgcgctggcgctggaacaggaaaaaagccgtcagcatattgaacaactcatccaatttgatccgatgaccggtctgccaaatcgcaataacctgcacaattacctcgatgacctggtcgacaaagccgtctctccggtggtgtatctcatcggtgttgaccatattcaggatgtgattgatagccttggctatgcgtgggccgatcaggcattgctggaagtggtcaatcgctttcgtgaaaaactcaaaccggatcagtatctctgtcgtatcgaaggtacgcagtttgtcctcgtgagcctggaaaacgacgtcagtaacattacccagatcgccgatgagctacggaatgtggtcagcaagccgataatgattgacgataaacccttcccgcttaccttgagtattggcatcagctacgacgtggggaaaaaccgcgattacctgctctccactgcccataacgcgatggattatattcgcaagaatggcggtaacggctggcagttcttcagcccggcgatgaacgaaatggtaaaagagcgtttggttttaggcgcagcgctgaaagaaacgattagcaataaccaactgaaactggtttaccagccgcaaatcttcgcagaaacgggtgaactgtacggcatcgaagcccttgctcgctggcacgatccccagcatggtcatgtacccccttcacggtttattcctctcgcagaagagattggtgaaatcgaaaatattgggcgctgggtcatcgcggaagcttgccgtcagttagcagaatggcgtagccagaatattcatatcccggcgttatccgtgaacttgtcggcgctgcactttcgcagtaatcaactgcctaatcaggtgtctgatgcaatgcaagcctggggtattgacggccaccagctgacggtggaaatcacggaaagcatgatgatggaacacgataccgaaatctttaagcgcattcagatcctgcgtgatatgggcgtgggtttatcggtagatgattttggcacgggcttttccggattatcccgcttagtcagtcttccggtaacggaaatcaaaattgacaaaagttttgtcgatcgttgtctgacggaaaaacgcatccttgccttacttgaagccattaccagcattgggcaaagcctcaatttaaccgtcgtggcggaaggcgtcgaaaccaaagagcaatttgagatgctacgcaagatccactgtcgcgttattcagggatatttcttttcccgccccctgcccgccgaagaaattccaggctggatgagcagcgtgttaccgctgaaaatctgacaaattcctctagcccgcactcgcgggtattcatttaacgtgacactgtcacttaaatactgtgatttcagctacgattccgggagattccttccttaacttcccctcttgcaccaaaactgcactacgctgcacaaatgttgatcaaaagttaaaaaatataactttaagccagcattctggcgcttctcccggcatggcatgagatctgcataagcggaaagcgcagcaatttttgtcttatacaggaaccgtttatgtcggataccaccgaactggttgatttagccgtaatcttccctgatctggagatcgaattgaaatacgcctgcgctgataacatcacaggtaaagctatttatcagcaagcgcgttgtctgttacacaaggatgcgattaccgcgctggcgaaaagtatcagtatcgcccagctgtcaggcttacaactggtgatttacgatgcgtatcgcccacaacaagcacaggcgatgttgtggcaagtctgcccagacccgcaatatgttgttgatgtgacggtcggttctaatcacagccgtggcacggcgatcgacctgacgcttcgtgatgagcacgggaacatcctcgatatgggcgcagggttcgatgaaatgcacgatcgctcccatgcttaccatccttccgtcccgcccgccgctcagcgcaatcgcctgttgctgaatgcgattatgactggtggcggttttgtcggtatctccagcgaatggtggcacttcgaattaccccaggcagcgagttacccactgctcgctgatcaattcacctgttttatatcccctggcacacagcacgtcagttaatcaggaaactgtcatgaaaagatcgatatcgtttcgtcctacattgctcgcgctcgtccttgccacaactttcccggttgcgcacgccgccgtaccgaaagatatgctggtgatcggtaaggctgccgatccacaaaccctcgacccggcggtgacaattgataataacgactggacggtgacctacccgtcttatcagcggctggttcagtacaaaacggacggtgataaaggctcaaccgacgttgaaggcgatctggcaagtagctggaaagcgtctgacgatcaaaaagagtggacgttcaccctgaaggataatgctaaatttgccgatggcacatctgtcactgccgaagcagtaaaactctcttttgagcggttactaaaaatcggccaggggccagcagaagcatttcccaaagatttaaagattgatgctcccgacgaacatacggtgaagtttacccttagccaaccattcgcaccgttcctctacacgctggcgaatgacggtgcatccattatcaatccggcggtgttaaaggaacatgcagcggatgatgctcgcggcttcctcgcgcaaaataccgccggttccggaccatttatgctgaaaagctggcaaaaaggtcagcaattagttctggtgccaaatccgcattactccggcaataaaccgaactttaagcgagtatcggtaaaaattatcggtgaaagtgcctcccgtcgcctgcagctctcccgtggcgacattgacattgccgatgcgctgccggtggatcaactcaacgccctgaagcaggaaaataaagtcaatgtggcagagtatccgtcactgcgcgtcacctatctgtatctgaataacagcaaagcgccacttaatcaggcggatctgcgtcgggccatttcctggtctaccgattatcagggcatggttaacggcattctgagtggtaacggaaaacaaatgcgcggcccgattccggaaggcatgtggggctacgatgcgacggcaatgcaatacaaccatgacgaaacgaaagccaaagccgaatgggataaagtgacgagcaaacccaccagcctgacgtttctctactccgataacgatccgaactgggaaccgatcgctctggcgacacaatccagtctcaacaagctgggcatcaatgtgaagctggaaaagctggcgaacgccaccatgcgcgacagagtgggtaaaggtgattacgacattgcgattggcaactggagtccggattttgccgacccgtatatgtttatgaattactggtttgagtcagacaaaaaaggtctgccgggtaaccgctcgttctatgaaaacagtgaggtcgataagttactgcgcaatgcgcttgcgaccaccgaccagacgcagcgtacccgggactaccagcaggcacagaaaatcgtcattgatgacgctgcttatgtgtacctgttccagaaaaactaccaactggcgatgaacaaagaggtgaaaggctttgtgttcaatcccatgctggaacaggtcttcaatatcaataccatgagtaaataacgtgaccttctggagtattttacgccaacgctgctgggggctggtgctcgtggtggcgggcgtctgcgtgattacgtttattatctcgcatctgatccctggtgatccggcgcggttactggcgggtgaccgcgccagcgatgctatcgtggaaaatattcgccagcatctgggactggaccagccactgtacgtacagttttaccgctacgtcagcgacctgtttcatggtgacctcggaacatccattcgtaccgggcgtccggtgctggaagagttgcgtatatttttctcggcgacgctggaactggctttttgtgccctgctgctggcactcctgattggcattccgctgggcatactctctgccgtctggcgaaatcgctggctggatcatctggtgcgaataatggccattaccggaatctccacacctgcgttctggcttgggctgggcgtcattgtgctgttttatggtcatctgcaaattcttcccggcggcggaaggcttgatgactggctggatccgccaacgcacgttaccggcttttatctgctcgatgcgctgcttgaaggcaacggtgaagtcttcttcaatgcgttgcaacatctcatcttaccggcattaacgctggcgtttgttcacctagggattgtcgcccgccagatccgttcagcgatgctggaacaattgagtgaagactacattcgtaccgccagggccagcggcttgtccggctggtatatcgttttatgttatgcgctacccaatgcgttgatcccatcgattaccgtattgggtctggcgctgggcgatttgttgtatggcgcagtgctcaccgaaaccgtttttgcctggcccggaatgggtgcatgggtagtgacatcaatacaggcgctcgacttcccggctgtgatgggctttgccgtcgtggtttcatttgcttatgtgctggtcaacctggtggtggatttgctctatttgtggattgatccgcgtatcggacgtggaggtggtgaatgatgctaagcgaggaaacgtccgccgtacgtccacaaaaacaaacgcgatttaatggtgcaaaactggtatggatgctgaaaggcagtccgctcaccgtgaccggcgcagtcatcattgtattaatgctactgatgatgattttttcaccgtggctggcgacgcatgatcccaacgccattgatttaaccgcccgcctttnnnnnnnnnnggcgcactggtttggcaccgatgaagtgggacgcgatctgttcagccgcgtactggtcggcagtcagcaatcaattctcgccggattagtggtggtcgccattgcgggtatgattggttcgctactcggatgtctatccggtgtgcttggcggacgcgcagacgccatcatcatgcgcatcatggacattatgctgtcgattccttcgttggtactgacaatggcactggctgccgctctcgggccgagtttgtttaacgccatgctggctattgctattgtgcgaattcccttttatgtgcgcctggcgcgggggcaagcattagttgtacgccagtatacctatgttcaggcggcgaaaacctttggcgcgtctcgttggcatctgatcaactggcatattttacgtaactccctaccgccgctgatcgtgcaggcatcgctggatatcggtagcgcgattttaatggccgccacgttgggatttattggcctgggtgctcaacaaccgagtgctgaatggggcgcgatggtagcaaatggtcgcaactatgtactcgatcagtggtggtattgcgcatttccgggggcagcgattttgcttaccgccgtcgggtttaatctctttggtgatggtattcgcgatctgcttgacccgaaagcaggaggaaagcagtcatgacccaacccgttctggacattcaacaactgcatttgagtttccccggttttcacggtgatgttcacgcgctcaacaatgtgtccttgcagattaaccgcggtgaaattgtcggtctggtgggagaatccggctcaggtaaatcagtcaccgcaatgctgattatgcgtctgctaccgacgggcagttattgcgtacatcgggggcagatttccctgctgggagaagatgttcttaacgcgcgggaaaaacagcttcgtcagtggcgcggcgcacgagtggcgatgatctttcaggaaccgatgaccgccctcaatccgacacgtcgaataggtcttcagatgatggacgtgatccgccatcatcaaccaataagtcgtcgggaagccagagctaaagcgattgacctgctggaagagatgcaaatcccggatgccgtggaagttatgtcgcgctatccgtttgagctttcaggtggtatgcgccagcgggtaatgattgcgctggcattctcctgcgagccgcaattgattattgccgacgaaccgactacggcgctggacgtcacggtgcagttgcaggtactgcgtttgcttaaacataaagcccgcgccagtggaactgcggttctgttcatcagccatgatatggccgtggtgtcgcaactgtgcgatagcgtttacgtgatgtatgccggaagcgtaattgaaagcggcgtgacggcagacgttatccatcatccccggcatccgtataccattggtttgctgcaatgcgcaccagaacatggagtaccacgccagctattacccgccattccagggacggtaccaaacctcacccatttgcctgacggctgcgcttttcgcgatcgttgctatgcggcaggtgcacagtgtgaaaacgtcccggcgctgacagcgtgtggtgacaacaaccagcgctgcgcctgttggtatccgcagcaggaggtcataagtgtctgacacgttattaacgttacgcgacgtccatatcaatttcccggcccgtaaaaactggcttggtaaaactacggaacatgttcatgccattaatggtattgatttacagatccgccgtggtgaaaccttagggatcgtcggcgagtcaggctgcggcaaaagcaccctcgcacagcttttaatgggtatgctgcaaccgagccacgggcagtacatccgttctggctcacaacgcattatgcagatggtgtttcaggacccgctctcttcgcttaatccgcgcttaccggtgtggcgcgtcatcacagaaccgctctggatagctaagcgtagtagtgaacaacagcggcgagcgttggcagaggagttggctgtgcaggtgggtattcgtccggagtatctcgaccgcctgcctcatgcgttctccggcgggcagcggcaacgtatcgccattgccagagcactctcttcgcagcctgacgtgattgtgcttgatgagccaacctctgcgctggatatctccgttcaggcgcagatcctcaatttactggtaacgctacaggaaaatcacgggctgacctatgtgctgatttcacacaatgtctcggtgatacgtcatatgagcgatcgggtggcggtgatgtatctcgggcagattgtagaactgggcgacgcgcagcaggtgctgacggcacctgcacatccatacacccgattattgctggattccctccccgccattgataaaccgctggaggaagaatgggcattacgtaaaacggatctgccgggaaaccgcacgttgccgcaaggctgttttttctacgaacgttgcccgctggcaacccacggatgtgaagtccggcaatcattagcaataagggaggacggacgtgagctccggtgctggcgggcgctgtagagatgctaacaacgcatcaggcattcacgcgcctgacgcgtcatccggcaatgctttacgatttcaactggtaatccagcgtaatttccgctttcagtacctgagagaccgggcatcctgcttttgctttctggatgatgccgtcaaaggtagaggcatcaatacccggcaccgcaacttcactcttcagtgcgattttcgtaatcgcaaaaccggcatccactttatccagcgacacatcggcggtggtatcaatcgatgttggcgtgaatcccgcttcccccagcattaatgaaagcgccattgagaaacatgcggcatgcgctgcgccaatcagttcttcagggttggttcctttttcgccttcaaaacgcgtgttaaatccatacggctgttggttcagcacgccactctcggtggatactgttcccttcccgcgtttgatatcgccttcccagtgtgcctgacctttcttatggattgtcattgttgctctcctgtgggcttaaaaaggaaattatagactacgtgagaaacagcacgaggataagcaggatattccgaataaaatccggcgaaaatattacttctgcacttaaattaaattcccacaatagattaccgggaatatataacccaaaagatattgtatcaatattaatcggatcataccaatcacaatccctatgaatatcatggtgttaaaatataaaaatcatcaaccaggactaatcttaacaacgaagcggcaaatatttgccatgctgaatgtgctttataaatctgcgatccgtagcagacaccataaatacacagacacggagaatcactatgtttacttattatcaggcagaaaattcaacagcagaacccgctctggttaatgccattgagcaaggccttcgggcacagcacggtgttgtcactgaagatgacattctcatggagctgaccaaatgggttgaagcttctgataacgacatcctcagtgatatctaccagcaaacgatcaattatgtggtcagtggccagcaccctacgctttaaggtgctatgcttgatcggcaacctaatttaggggtttagcacgtgtttcttcgctacggcgatgttgtccttaaaactagcaacaggattgaggagttaaaatgaaatcgaaccgtcaggcacgtcatattcttggactggaccataaaatttctaaccagcgcaaaatagttaccgaaggtgacaaatccagcgtggtaaataacccaaccggcagaaaacgccccgctgaaaagtaattcataaccatcagtcctcaatgacgattaaacaccattgcctgcgcaatggtgtttttgtttttatctgctttatacttggggccgacgccctggcggtaaagcaaagacgataaaagcgtgccagggatggatattcaaaaaagagtgagtgacatggaaccaaaaacaaaaaaacagcgttcgctttatatcccttacgctggccctgtactgctggaatttccgttgttgaataaaggcagtgccttcagcatggaagaacgccgtaacttcaacctgctggggttactgccggaagtggtcgaaaccatcgaagaacaagcggaacgagcatggatccagtatcagggattcaaaaccgaaatcgacaaacacatctacctgcgtaacatccaggacaccaacgaaaccctcttctaccgtctggtaaacaatcatcttgatgagatgatgcctgttatttataccccaaccgtcggcgcagcctgtgagcgtttttctgagatctaccgccgttcacgcggcgtgtttatctcttaccagaaccggcacaatatggacgatattctgcaaaacgtgccgaaccataatattaaagtgattgtggtgactgacggtgaacgtattctggggcttggtgaccagggcatcggcgggatgggcattccgatcggtaaactgtcgctctataccgcctgtggcggcatcagcccggcgtatacccttccggtggtgctggatgtcggaacgaacaaccaacagctgcttaacgatccgctgtatatgggctggcgtaatccgcgtatcactgacgatgaatactatgaattcgttgatgaatttatccaggctgtgaaacaacgctggccggacgtgctgttgcagtttgaagactttgctcaaaaaaatgcgatgccgttacttaaccgctatcgcaatgaaatttgttcttttaacgatgacattcagggcactgcggcagtaacagtcggcacactgatcgcagccagccgcgcggcaggtggtcagttaagcgagaaaaaaatcgtcttccttggcgcaggttcagcgggatgcggcattgccgaaatgatcatcgcccagacccagcgcgaaggattaagcgaggaagcagcgcggcagaaagtctttatggtcgatcgctttggcctgctgacggacaagatgccgaacctgctacctttccagaccaaactggtgcagaagcgcgaaaacctcagtgactgggataccgacagcgatgtgttgtcactgctggatgtggtgcgcaatgtaaaaccagatattctgattggcgtctcaggacagaccgggctgtttacggaagagatcattcgtgagatgcataaacactgtccgcgtccgatcgtgatgccgctgtctaacccgacgtcacgcgtggaagccacaccgcaggacattatcgcctggaccgaaggtaacgcgctggtcgccactggcagcccgtttaatccagtggtatggaaagataaaatctaccctatcgcccagtgtaacaacgcctttattttcccgggcatcggcctgggggttattgcttccggcgcgtcacgtatcaccgatgagatgctgatgtcggcaagtgaaacgcttgctcagtattcgccgctggtcctgaacggcgaaggtctggtactaccggaactgaaagatattcagaaagtctcccgcgcaattgcgtttgcggttggcaaaatggcgcagcagcaaggcgtggcggtgaaaacatctgccgaagctctgcaacaggccattgatgataatttctggcaagccgaataccgcgactaccgccgtacctccatctaagcctgcgcccggtagtgaaggctaccgggctatttctctctccctttttcagatctcatccatactgggtagtggcgaataaatctcatttgcctcacctgctatgcagaacatcatccgaaaaggaggaactatgaaggctgcagttgttacgaaggatcatcacgttgacgttacggataaaacactgcgctcactgaaacatggcgaagccctgctgaaaatggagtgttgtggtgtatgtcataccgatcttcatgttaagaatggcgattttggtgacaaaactggcgtaattctgggccatgaaggcatcggtgtggtggcagaagttggcccaggtgtcacctcattaaaaccaggcgatcgtgccagcgtggcgtggttctacgaaggatgcggtcattgtgaatactgtaatagtggtaacgaaacgctctgccgttcagttaaaaatgccggatacagcgttgatggcgggatggcggaagagtgcatcgtggtcgccgattacgcggtaaaagtgccagatggtctggactcggcggcggccagcagcattacctgtgcgggggtcaccacctacaaagccgttaaactgtcaaaaattcgtccagggcagtggattgctatctacggtcttggcggtctgggtaacctcgctctgcaatacgcgaagaatgtctttaacgcgaaagtgatcgccattgatgtcaatgatgagcagttaaaactggcaaccgaaatgggtgcagatttagcgattaactcacgcaccgaagacgccgccaaaattgtgcaggagaaaaccggtggcgctcacgctgcggtggtaacagcagttgctaaagctgcgtttaactcggcagttgatgctgtccgtgcaggcggtcgtgttgtggctgtcggtctgccgccggagtctatgagcctggatatcccacggctggtgctggatggcattgaagtggtcggttcgctggtctgcacgcgccaggatttaactgaagccttccagtttgccgccgaaggtaaagtggtgccgaaagtcgccctgcgtccgttagcggacatcaacaccatctttactgagatggaagaaggcaaaatccgtggccgcatggtgattgatttccgtcactaagaggcctttgctgcgactgccatgttcgggtcgcagcatcgcacactctccaacatgaaatggctaaatggattattgttgcgtaggaaggaacaataatgatagtgttcccagtgaaggaacgctactgagagtaaagacactaatgaaaatggccaatcatccccgcccgggggacattattcaggaatcactggacgaacttaatgtcagcctgcgcgagtttgccagagcaatggaaattgctccctcaacggcaagccgattgctgacaggaaaagcagctttgacgccagaaatggcgattaaactttccgtggtgatcggcagttcgccgcaaatgtggctgaatctgcaaaacgcctggagtctggcagaggcagaaaaaacagtggatgtgtcgcgattacgccgtctggttacgcaataaaaaaatggcactttataaagcgccatttagaactgatgacaaacgcaacattgcctgatgcgctacgcttatcaggcctacacgttcactgcaatctattggatttgaaggggttgtaggccggataaggcgttcacgccgcatctggcatgaacaaagcctacgttgtctacaatatgaaaatgacgccttttacagcgccatttgaaactgatgacaaacgcaacattgcctgatgcgctacgcttatcaggcctacacgttcactgcaatctattggatttgaagggtttgtaggccggataaggcgttcacgccgcatccgggatgaacaaagcctacgttgtctacaatatgaaaatggcgccttttacagcgccattttcagcttaaagttcaaaagagattatatcccttcttcactctcttttttcgcttctgccttctcgatttcacgataccagcgtggatggtgtttcttcgcccagcgacggctcaccttcccttcgatcatccctttaatcgaccctttcacccaaaatgccatatacatatggatcaggatggcgtggatcaggatgatacccgcagccgcgtggatcagcaggctgtagcgaacaacctgcatcgggaagtactgcgcaaagtacggacgccagataatcaccccggtcaccagcagcacgaaaatcatgctcatgatcgaccagaacatcatcttttgcccggcgttgtacttaccgacatccgccactttatgctcattgcctttcaatacttcgacaatgttcaacagccacggaatatctttcttatccgggatgttgtgatgcacaaaacgcacaaacataaacatcagtgcgacgaaaatcgcaatgccgaagaacgggtgcaaaatgcgtcccatctgcggcgtaccgaaggtttgcgtcagccattgcagcgtcgggaagaagaacgaaatcccggacagcgccaccaggaagaagcaaatcaccacggtccagtgacaggcgcgatcaataaatttggtgcgcacaatcattttcgacttactcatgatgatcctcctcgtcatcgtccacttccttattcgggccaataccgatgtagtggaaaatcaacccggcaaaagtggcaataaagccagccgctgccagcggtttcaacgcgcctttccacaggcttaccgaggtgtcgatcttcggatctttcggcagaccgtgatacagctccggctgatcggcgtgatgcagcacgtacataacgtgcgtaccaccgaccccttccgggttgtagacgccagcatgttcgtaaccacgcgctttcagtttcgccacgcgctgttccgccagctccagcatctccttcttggtgccgaagtggatagccccggtcggacaggttttcacacaagccggttcctggccgacgctgacgcgatcgacgcagagcgtgcatttatatacccggttatcctctttgttgaggcgcggaatattaaacggacacccggcaatgcagtaaccacagccgatgcagttttccgactggaaatcgacaatcccgttagcgtactgaatgattgcaccagcagacgggcacgccttcaggcagccgggatcttcacagtgcatacagccgtctttacggatcagccactccagcttgccgttctgttcggtttcgctaaagcgcatcaccgtccaggacttggcgctcagatcggcggggttatcgtaaaccccgacgcagtgccccacttcatcacggatgtcgttccactccgaacacgccacctgacaggctttacagccgatacaggtggaaacgtcgataagttttgcgacttctgctttgtaatcacgcacctgagaaggcggcgtgatggagttagttgcggaccttttgataatgtcctgcgtttccatagccatctgttcgcccccttacgccttctcgatgttgactaagaacgctttatattccggcgtttgcgagtttgcatcaccgacattcggcgtcagagtgttagcgatataacctttacgcgcgacaccctcaaagccccagtggattggaatacccaccgtttcaacctgctgaccatttacattcagcggtttcagacgacgcgttaccacagccaccgcgcggataaagccacgcttgctggagacagtgacacgatcgccattattaatgcctttcgccgccgccagcgtttcgctgatttccacaaactgttccggctgagcaattgcgttgagcaatgcgtgcttggtccaggtgtggaagtgctcggtcagacgataggtcgtacccacatacgggaactgttcttttttacccatccgcagcgcgtcttgttcatacagacgaacaaccgggttagacaccacgttcggatgcagcgggttagtgcccagcggcgtttcaatcggctcgtagtgttccgggaacggaccttccgccattttgttgatggcaaacaggcgtcccatcccttccggctgcatgataaacggcccggttggcgtacccggtgcggcattgccgaagtcaggaatatcgttacccgtccacttgctgccgttccactggatcagcatccgtttcggatcccacggtttaccgttgatatccgccgaagcacggttgtacagcacgcgacggttgagcggccacgcccaggcccatcccagcgtattccccagaccggacgggtcggagttatcgcggttagccatctggttgccctgctctgtccagctaccggtgtagatccagcaagaagatgcggttgtaccgtcatcacgcagatgcgcaaagctactcagcaactgacctttcttcgcaataagcacgccattagcgtcatagagatcttccagcgcgtagccgttgttctctttagccacttcgtcagattgcggttcgtgcggctgcttgtagttccagctcatcttcatcagcggttctacgcctttaccaccttcggactggtacagctcgcgcagatgatggtagatacccgccagaatttcaccgtcgttacgcgcttcgcccggcgcgtcctgacctttccagtgccactgcaaccagcgaccggagttagcgatagaaccatcttcttcagcaaagcaggtcgaaggcagacggaatacttcagtctgaatagacgccggatcgacatcgttcgactcaccgtggttctgccagaaggtagaggtttcagtcaccagcggatcgataaccaccatgtacttcagcttgctcaggcagctcaccactttgtttttgtccgggaaggacgcaaccgggttaaagccctggcagaaataaccggtgactttgccttcatccatcatgttgaaatacttgatgacgtcgtaggtctggtcccacttcggcagccagtcatagccccagttgttctctttctgcgcggcatcgccatagaaagatttcatcaggctaacgaagaacttcggatagttgctccagtagttcacctgatcagccagcgtcgctttcggcgtgttcgcttccagatacgactgcaaatcaacctgtttttctnnnnnnnnnnnnnnnnnnnnnnnnnnnnnnnnnnnnnnnnnnnnnnnnnnnnnnnnnnnnnnncagataacctggcaggctggtagagagcaggcctaagtcagtcaagccctgaatgttggagtgaccacgcaatgcgttcacgccgccaccggccatacccatgttaccgagcagcaactggatcatcgccatagtacggatgttctgcgcacccacagtgtgctgcgtccagcccagcgcgtacaggaaggtggttgtgcgatccggtgcgctggtggaggccagcacttcacacactttcaggaagtcggcttttggcgtaccgcagatgttttcaacgacgtccggcgtgtagcgggaaacgtgctctttcagcaggttccacacacagcgcggatgagtcagtgtttcatcgcgtttcgcatagccgttttcatcgaactgatagttccaggacgatttatcgtattgacgtttttcagcgtcgtagccgctgaacagaccgtcttcgaaagcaaaatcatcacgcaccagcaggctggcgttggtgtaatgcttaacgtattcggcgttgattttgttgttttcgatcaggtagcgcaaaacgccagacaggaacgtaatgtccgtaccggaacgaataggcgcgtaaatatccgccacagaagcggtacgcgtaaaacggggatcgacaacgatcaaggttgcatcgttgttgtttttcgcttccatcgcccagcggaaaccgacgggatgcgcttcagcagcgttaccgcccatcaccatcacgacgttagcgtttttgatatccacccagtggttggtcatcgcaccgcgaccaaatgttggagcaagacttgctaccgttggtccgtgtcagacgcgcgcctggttgtctaccgccagcatcccgagggagcgggcaaatttctgggtcagcatcccggtttcgttgctggcaccggaggcacacagcataccggtagaaagccaacggtttaccgttacgccctgctcgttcttttcaataaagttagcgtcacggtcagctttcatcagcttcgcaatacgggagaatgcttcttcccagctaatgcgctgccatttgtcagaacctggcgcacgatattccgggtagcgcagacggttttcactgttgacgtaatccagcaaaccggcccctttcgggcacagcgcaccacggcttaccggatgatccgggtcaccttcaatgtgataaatcgcttctctggcgttttttgcgccatcacccaggctatacatcaatagcccgcaacctacggaacagtatgtgcaggtgttacggatctctttagcgcgtaataatttgtagtttcgcgcctgagccagtgcttgcttcggggcaaagcccaatgccgctactgttgttccagccataccgcccgcgcagattttaaaaaattgtctgcgactgacgtccattgctttcctcttttttcaggggtattactgcgcgaggaaactaacagtaaaattctgaatctttttgcgcgaaatcaaaaagaacacgtgtttgccacaaaataatccgcctgcgcaaattgacctacctcaatagcggtagaaaaacgcaccactgcctgacaggccagttaaaaaaatgctataaaattcagcttaatttttaacggcaagagagacaaaacagcgagcatgacacgacaaaaagcaacgctcatagggctaatagcgatcgtcctgtggagcacgatggtaggattgattcgcggtgtcagtgaggggctcggcccggtcggcggcgcagctgctatctattcattaagcgggctgctgttaatcttcacggttggatttccgcgtattcggcaaatcccgaaaggctatttactcgccgggagtctgttattcgtcagctatgaaatctgtctggcgctttccttagggtatgcggcgacccgtcatcaggcgattgaagtgggtatggtgaactatctgtggcccagcctgacaattctctttgccattctgtttaatggtcagaaaaccaactggttgattgtacctggattattattagccctcgtcggcgtctgctgggtgttaggcggtgacaatgggttacattatgatgaaatcatcaataatatcaccaccagcccattgagttatttcctggcgttcattggtgcgtttatctgggcagcctattgcacagtaacgaataaatacgcacgcggatttaacggaattaccgtttttgtcctgctaacgggagcatgtctgtggatttactattttctcacgccacaaccagaaatggtatttagcacgcccgtcatgattaaactcatctctgcggcatttaccttaggatttgcttatgctgcatggaatgtcggtatattgcatggcaatgtcaccataatggcggtaggctcgtattttacgcctgtactttcctcagcgcttgcagccgtgctgctcagcgccccgctgtcgttctcgttctggcaaggcgcgctaatggtctgcggcggttccctgctctgctggctggcgacacgtcgtggttaaaataattgccgggtctacggcccggcagttaatcagataaattccgacaat

SEQ ID NO: 219 - DNA, 25529 bp, Escherichia coli
  source 1..25529: mol_type = genomic DNA
cgttgcgccatcagcggaaagaaactgctgacggcaaaactgccgagatgtaacaggcgtttcagggtgctcggctgttttggcacgtacagcgggcagcgccacaccgtggcggccccctcttctcgtttgtagcgccaggcggaatagttctcgcccacctgccactgcgggtagtaaggcggtgcggtaatgacccgcacctcatgaccttgtgctaccagccattccaccatctcgccagtgtatttgccgatgccggttaactccggcgagtagttaatgccgtagaccagtattttcataatccgggtactccggcacgcttctcagcgagaaaataggcgcggctgttagcgtgaacattgtcactggcgagcagtgcatccggcgtcagccagcggtaatcgtcatgctgctcatccggcagtaacagctcttcttccgatactctgaagcgaaaaccgagcaccacatagtgagtggtgaaatccgtgccagagaagttatcgtcataaaagtgctgccagacaccgtaaaactggcctgctgttatcggcaaacgcagccccagttccgccatcgtcagccgctcaaatgcggcttccagcgtttcgtctttctgcacgcgccctcccggcacaaaccagtaaccctgcgccgggcggttggttcttttgccaagcagaaactcgccgcgactgttctcgacaataaagtcgagagagacaagcggagtggagcgcactaccgtggcaaagtcttcctgacgtaaaaacatcattacccccgaaagcggtcttgattctcaaggaaccactggtaagtgctggcaagccccgcttccagtgagatttcgtgataccagccaagctgatgcaggcgcgtcacatccagcagtttgcgcggcgtgccatccggtttgctggcatcaaaaaccacccggcctttgtaacccaccactttggcgatggtttgcgccagctcgcggatagtgcagtcaacgcccgtgccgacgttaatgtgcgacaacatcggctgggtgttctccagccagacttcatgcgccagctccatgacatgaatgctcgccgccgccatatcatcgacgtgcagaaattcgcgcatcggtgtaccgctgccccataccaccacgtccggcgcattctgtgccgtcgcctcgtggaagcgacgcagcaatgctgggatcacatgcgaattactcgggtggaagttgtcgtgtggcccgtacaggttggtcggcatgactgagcggtaatcgcgtccgtactggcggttgtatgattcgcacagtttgatcccggcgattttggcaatagcataaggctcgttagtcggctccagcgtgccctgcaacaactcgctttctgccatcggctgttttgccagtttcgggtagatgcaggacgatccgagaaacagcagtttgttcacgtcgttctgatgcgcggcgtgaatgatgttgctctcaatcatcatgttctggtagatgaaatccgccggataggtgttgttggcaacaatgccgcccactttcgccgccgccagatagacctggtcaatacgttcgctggcaaagaaatcatgcacggcgcggctgtccagcaggttcagctcgtcgcgggtgcgtaataccagttccacatcaccgcgctgttcgagctgccgcctgatggcggaaccgaccatcccgcgatgaccagcaataaaaactcgttgtttactcatgcttatgactccagcgcgatcgccacgtcgtagccgtgagatttcagcagagagtgttttttcgccgcttcgaggtcattagccaccatttcagacaccatctctctgagggtgatttccggtttccagcccagtttttcgtgcgctttggtcgggtcgccgagcagcgtttcaacttcagccggacggaagtaacgcgggtcaacagcgataatcacatcacccggtttaacgcccggcgcgtcatgcccggtgacggaaaccacaatgcccttctcttcaacgcccgtgccttcaaagcgcagtttgatgcccagctgtgctgccgccatttccacgaactgacgcacggagtactgaacgccggtcgcgataacgaaatcttccggctgttcctgctgcagcatcatccactgcatttttacgtagtctttggcgtggccccagtcacgcagggaatccatattgccgaggtacaggcacgactccagcccctgggcgatgttggcgattgcgcgggtgattttgcgggtaacgaaggtttcgccgcggcgcggggattcatggttgaagagaattccgttacaggcgtacatgccgtaggattcacggtagttaacggtgatccagtaggcgtacagtttggcgaccgcatacggagatcgcgggtagaacggcgtggtctctttctgcggaatttcctgcaccagaccatacagttcagaggtggaagcctgatagaaacgagttttcttttccagaccgaggaagcggatcgcctccagcaggcgcagcgtacccatcgcgtcgacgtcagcggtatattctggtgactcaaaagagaccgcaacgtggctcattgcgcccaggttgtacacttcatccggctgtacttcacgcaaaatgcgcgtcaggttagaggtatcactcaggtcgccataatgcagatggaatttcgggttgcaggtgtgcggatcctgataaatgtgatccacgcgctcggtgttgaatgacgatgcgcgacgcttaataccatgcacctcgtaaccnnnnnnnnnnactctgccaggtaagaaccgtcttgtccggttacaccggtgatgagagcgacttttgacatgtattattcctctgtatttttgaatttattcagtttcaacgcgttcgcgtatcaccactgcgggattcccccggcaaaccacatttgccggaagcgatttaaaaacactgcttcgtgcacccacgacggtgccgtcgccgattgtgacgcctggggcaacaaagacatcggttgccagccagcatttctcgccaatcacaataggcgtggcgttaatggtgaaatgttgacttgcatggtcgtggctaccggtgcataaataacttttttgcgatatcaccgaatgtgcgccaatggttatttcaccgagggtatataaattgacgtcatcgccgacccacgcgtaatcacctaaggttaatttccacggataggtaatttttactgacggacgaataactacgttttttcctatttttgctccgaataaacgtaataaaaaagcccgccagcgatacaatacttgtggcgaccaggcaaatattgttgcctgtactgcccaccataattgcactttaatagcgttgccgccccggaaccctttcggcaccgagaaaccgcttaaatcttgcattggttttccttatattcagactttgttatataaggctttcgtctttgaggtagtacgttggcgtaaatgccaggataattcagcccaaaagccaggcacatgtaatatttgtcgttggacttttttcgcgtcagcacacaattccatattattggtggtagataccccacccatggaaaattcagacaccaggccattgagttttttaaatgcataaccggctttatacattttggctgccagcgcgtagtcggaagaaactttatattccaggtcataacgccattttttcaagccagatacagggaaatatatcgcctgatgactggcgggcaggctgtgataaatataccagcccggtttggcgctacgtttaattttatgcccgtcgccaaaatccagcagcgcatcgccggtgatcatcacgttatctttttgcatttttaacttacggacaaaatttgcggcattctgatgaaaaatatcgcccgaattgagaaacaacgcgaacttgccttgtgccatcgcaatgcctttgttcatggcgtcgtagataccgttatctggctcgctgacaaagcgtaggttaaagataccattgagattttccagatactcacgggtgccgtcgttggaaccgccatcgacaacaatccattcgaagctgatatcttccacctgcgccagatgcgccagcgaggcatgtgttttgactatcccttcgaggttacgaaacgcgacagtgattatgctaagcaacatgttcttattcttacctcgtaatatttaacgcttttcgcaaaataaacggacagacgattaaaaatgcatattccgggctaaatatcgaaccggtaaaaaacagcgataccggagtaaaaagatataattgcacgcgaaaattgcggttatcaccaaaagcgttgatcatcatttttatcactttccccatgtaccacagtgataaaaacaccgcgaaccaggaaaaataaataatcagcagatacaaaccattgtctatggtttttccgacatccgcaccgttaaatattccgaatgatgcgacatattcataaagtgagccaaatctgactacaccgtcaatatgggtcaaagaataaccgaccatcaccagcggaccgacaatacgataatatgatgacgatccttccgtacctaaatcgcccagacgggtggaaatataaggaaacgcgattaccacaccaaccaggaatacagccagagaaatcaatgctaacggtaactttttcttaatcgcctctttattcagatattgaaatgcccactccagcaaataaaacaggataaaggtcataacccctgaaaacgatccggataatattatccctgcgagaatcatagcatctgttttaggcgttttgataccaaactgtttgatgctgagccaaattgagattaatgccagagcgaaaaatgccggttcgaaataaagtgctgtcgtgcgcttgccgccgaatttaatgaaattcagcacatagctgttgctgtaaatcagatatttcgaaatcgactccataatactgctgccaccggtgaggataatttgtgccatctccaccgccgccagcgccaccaccagcccgaccaccagataaaagaaacgtaatatcttgcgatggttgtgtggcgaaattgttttaaaacgaatactccacaccatgccaataatgatcacaatatagacaaacagcatagttgaagtgacgtatttactggcatccagcgactgaccaaacagatagttaaacgccgtgagtcccgcgccaatccctaaggcaatcatcaattttttaacgctgatgcgttctaaaaacagcagtaacaagacaggtaaaaaagtgacgatggtgatggggaaactttcgccaagctgggcgattttgacgttaaccagcagataaatcagcggcagcaacaggtagctacagattctgatagaagttgacatactcctccagcatctgttgtccactgtaggcggcgcggctgcgttggctgaactcagccagcgtggtaccaaatatcgcctgcgcgatttccggtttgcttaactgcaccagttgcagcacctcttcttcgctgacggttttaccgccggatttttgcaacacttcccgcgccgcatcgctatgggtggcaatcaccggcacgccaatcgatagcgcctcacacaaaatcagcgggtagttatcgacgcgagaactgaataccagcgcatccatctgattgagcgcgctcatcagcttacgtttgtcggtttcaaagccgtgattaaccacgttgccagcggtgaacggcgagaacttaccaaaggtatgcagttcaattttgtcgcccagcgccatcatctcgcgtaccagttgctggttagttttgccgtcgtaacgcagatcatgcgccaccaccgcgattttcggcttgccctgggtttcgcgcaccggaggcaagtccgccagaatcgcttcagttgccatatcaatgccattattgataatccggcaacgccctggaccgtacaggctattgaaagcgtcagccacatgctggctgggggaaataaactgacagcccagcgccagcatctcacggaataactggcgtttgcccgccaccagttggtgtgcgcgatcaatcttcaccggcggatagttatttaaggtcgggcatttctggcagcctgttttccagccttcgcaaccgtcggtaaaggcgcagcgtccggtaacactccagtggtcgtgcagcgtccagaccagagtgacgtccggtttatggtttttcactttttcgcaaaagcgcaccacgctcttaagatttagccagtagctgtgcagcacatgaaaatgcaggaccaccggacccgctgtgcgagtaatggtgcgatataactcattgaaattgccaaacagatcgcgattaaacagacgaaacagagcaatattcgccatcgcggtcatccgcggcgtatgtttgatgacctgcggatagttctgatggctgacgctctctttgccgcctttgccgtaaccgtagacaaaatgtgacgccagcccctgttgcagcgcacgctggtggagatctaacgccacacctgctgccccgccttccgccagtcgcacattaaattgcaaaatattcatttaattaccttcactcgcgctttttctcccaccaccagcgcgttgtccgggacagagtcgagcaccacgctgcccgcgcccacggtgacgttgttaccaagcgtgatatcaccaagaataatgacgttggcaccgagttcgacgccgttgccaatgtgtggacatgccatgttatcggcaccacgattgccgatagtgacgccgtggcgaatggtaaaatcatcccccgctaccacgtttttattgatcacgacggcgtaaccgtgatggatagtaaagcggcggccaatggtcgcggcagcctggatttcataaccgaaaaagcattcggtgataatgcgatacagcaccagcagcggggccgcccacagattgttgaggacgttctttttgcgccacaccgaacaaaaatgagcaacacgataggcaagaaccatgcagcacgggcgtaaactccagctgttggcgcgcagatcttccagcatctttagcgcccccgaataccatcagccagacgtttgccgttacgcaccgacagcagcgtcagcaaagtgcgccaggtcatacgtttattgcggatctggtagagggtaaacagctgatattttttgctggcgcggtcgaatttgtctttgtgcttgcggtaaaagtggaagtacccggagaattttttcggtgacgaggtgatctgcatttcaccgtgattgatatgcaggatctgcgtcgcctcttctactttccacggttcgccgtactccaccaccatccgcaggaagatgtcgtaatcctgtgccgctttcagttcggtatcgaacaaacactctttgaaacgccatgcccaggtaaagacctggttgccaatgatattgcgtttgtagaacaggcggcgtgaatacggcgatttgggatacagcggcaagcttgccggttgggaatagacttcgccctggcaaacgtagtcgttagcgtacaaaaaggcgtgtgtgaccagttgctgtttatgggcgaggaagacgctcagacggttgggtgtccattcgtcatcgtcatcaatcccggtgatatattccccttgcgccagcataatcgcctggttacgtaccgcgcacgccccgctgttaatgtcgttgtgaatgtaagtgatacgcggatcgttgagggcggtgacgtactgttgcagttgttcccaggaggtggagcaatcatccacgatgatcatctcccagttgctgtagtcctggcgcaaaaccgattttattgcccgaatcgccagttgttggcggttccaggtcggcatatagattgagatcagcggattgtctttcataggttgttctcccggcttatgagctggtttgcttgccggatgcggcgtgaacgccttatccggcctacggggcggtgcgaatgcaggcgtcgttatttcgcatccgacttatattcgtattcgtaatagccataatcctgatacgcgctggcgcggcggaagatggagttcagaatcacccctttcaccggaataccgttttgctcaaagcggctcagactggtttccacttctttcaatgtgttgaccgcataacgcgccaccattaacgtggttccgacatgacgaccaacaattgccgcatcggtcactgccagaatcggcggcgtatcaatcaacaccaggtcatagtttttactcgcccagttcaccagttcggcaaagcgttcgctcatcaacagttcagaaggatttggcggcacctgaccgcgcgggatcaggtcaaatttggcaatagaggtcggtttagcagcggtagtaatatcgccctgaccaatcagaatttccgacaggccattaacgttattagtgcccaacagctcgtgggtgtagcctttgcgcatatcgcagtcgatcaacaacacgcgtttattggtctggctgatcaccgccgccaggttggcgcagacaaaggttttaccaattgacgggctaaccccggtcatcatcaacacattgttctgtgcctgcatcatcgcgaagtgcaaactggtacgcagactacggatggcttcaatcgccagatcggttggattccccaccgccagtagctggctctgtttatagcgtttaatccctttgatggttttgacgctatcacgcgctttctgccattccgacagcgggatgctggcatagacgctaataccgtgttcttccagtacttgcgggctttcaatgccgcgattaaacaacgagcgcagcagcacacccacgatagaaagcatcaggccaaggataatcgcgccgaggataatcagccctttcttcggtttcagcacgccaggctgagtgattgccgggtcaacaatgcgcacatcgccgacggtgctggcctcggtgattttcagctcctgctctttattcagcagttgcatatagacctgctgaccagactcgacatcgcgggtcagacggacaatctcctgctgggttttcggcatcgccgttacgcgaccgttaagtttggctttttcgtcttccagcgcctgacgtttctccagcagcgtgcggtacgccgggtgaactttggtgtacagcttggagatttccgcctctttaaaggtcagttcgttcaactgcgcatcgatgttcaccatcgaatcgagcaccgcttttgcttccagcggcagatcaacagaatctttatcctgacggaaggcattcagtttgttttcggcaacatccaagcggctacgtacttccggtaactgttgcgcgaggaaggtgaggcttttcgacgcttccgccgatttgcgctcaatattttgttcctgatagttacgggcgatgctgttaagaatgtcgcggatctgttcacgatcttcaccggtataagtcaggctcaaaacgccagcgtctttgccgttctccgttaccgtcaggctgttttgcagttggttgatcatccccagcgtggagtatttggtgacggtaaactcactgcccgggctggcgtgaatggcttcaaccatcagcgtgacgccttcttttttcagcatctggcccgcttgcccccgggcgctaaagccgccgtcgctgctcagggtgtagtttttgttgtccagcacattaagcgtaaacacctgatccgccatctctttcgggcggttaaaggtggtcactttcaccgtctcgttctgacgtcccatcaggcgatcccagcccgcaccgaaaatcgggaacgtgtttttgctcactgcaatatcgaggtcgagatcgtccaccgttttaccaagcaccagacgcgaacgaatcaactggatctcggcgtccgatgcaggcggtttgttggctaatgccgaaccaatgtcctgcactaacgaattgccgctgttttgctcgatttgtaccagtgcgtcggcactataaatcggcgtggcgaagaaggtgtaaaccacggcacagagggcgaatacggtggtgatgccaatcacccaccagcgcgcttcaannnnnnnnnnaccaggcgaccaatatcgatttcatcactgcccgttaccggagcggcatgttgttttactttttctgtcattcttatacctgctctgcgttcaatgcctgcgcccactggcgggcagaccgttcaagtaatgtgtacaccgctgcaaacgtttcccggcttttgcgatacggatcggggatttcacattcgttatcccagtgaccaaacagcatcactttgccgcgcatctccggtgccatctcgcataagcgttcgatatggcgcttttccatggtcaaaatcaggtcgtagttgcgacacagacggcggctgatttgacgggcacagtgaccttccagagacagttgatgttctgcggcgacgctgatagcggtaggatcagcgcccttaccgaccagcgcgccgagtccagcggactccactttcagctccgggtgataacgttgcagtaagcgttccgccgtcggggaacggcaaatattgccgacacagacaactaagatgttgttaaacatgacgattaccagttatgaatgtcgctggctgtatccgtcatgtaacggacaccgctaatagttggcagcaactgattgatcagacggttccagcgggaaaccggggcggtggtgacatacaccacgtcataaggttgcaggcggaattctgtcgccatcaccagcgacgtggcatcggacatatccagctggtagatattggcaatcttgccgttacgcccgccctcgcctttcagcggacgaatgacaaagatgccgctggcgttggaggtggtcatgtcgatgccttcagcattgcccagggcttcagtcagggtcatgccgctaaagtccattttcagggtgctctgtttcttcacttcacccatcacaaatactttcagatcatcattacgtggcacgtagagaatatcgccggggtaaagcaggcgattctggttgaggtcgccgttttgcatcagcgcctgcaaagaaatgcgctcttcacgaccattgtgtgttagcaccacgttgcgccagtcagcggtgtcggtcaggccacctgcggcgttgatggcgtcgagaatagtcagtggcacgttggtgatcgcctgttgaccggatttattcacctgaccggagatataggccttttgtgagcggaaggcggcgatattaacgtccacctgcgggtcagcgatgtacgtcgctaagcgcccggtaatatcactgcggatttcagcgagcgttttcccgactacgtggaccttgccgatatacgggtaaaacatagtgccgtcaggctgtacccagttgccggtgtcgctggagctgcggtactgaccggctggcgtggtgagttccgggtgatcccagacggtgacattaagaacgtcccccggcccgacgcgatactggtaattcgcgatctcactttccagcgtcatattggggcgcgctacattcgggcgtgggcgtaattggtcaatcaggcgcggggtcagcggataaacattcaccattttgtcgagatcgaaatcagcgtcctgctgtttgatgacgtctttgcccatcgtcgacatattgctgcccggaagtactgtgcaaccgcttatcaaggttactgacaccaataatggcatcaatttcattttggatttcatcattgtttatttatcactttggcagagtaattatcctgtgcactattaatagcaatgtcgccatgcacatttaccttgcagttaattgaataaaaatttaactggcatcagtcctaaaaaaattgatttcatccgcaggctattgacagaataattcagactggtctttcaggcatccagacacgctaccgcccctggctttttagctaccaatacactgatttagtttaatttttcacaccctctcagcatgcagtcgttgatgagaaagggttattacggaaattaacttccgaatataaggtgacattatggtaattgaatattggctttccaataatgcaggaggaagtgttacagctaacggaatagcaggcaagataacaattcggtaattggctatttttaagaattatattaagtgtcattcaatatggcttttaggagtttctttaggttgacaatatttaatatagtgtctccacatgcgatatttcttaaataatgttttattattaccacttttaattcagggataatgtgaggttattaccctcaaataatatgagataaatagtgctgcaacattgcatttttgccccgatttatccatgatcgaattgtgacatttgtcatacaacgaataggttttgtacttactatggaatggattgccgatccgtctatctgggccgggttaatcacgctgattgtgatcgaactggtcctcggcattgataacctggtctttattgccatcctcgccgaaaaactaccgccgaagcagcgtgaccgcgcacgggttaccgggctgctgctggcaatgttaatgcgcctgttactgctggcgtcaatctcctggctggtcaccctgactcaaccgctgttcagcttccgctcgtttacctttagcgcccgcgacttaatcatgctgtttggtggtttcttcctgttgttcaaagccacgatggagctgaacgaacggctggaagggaaagacagcaataatcccacacaacgcaaaggtgcgaagttctggggcgtggtgacgcaaattgtggtactggacgccattttctcactcgactcagtgattaccgccgtcgggatggtcgaccatttactggtcatgatggccgccgtggttatcgctatcagcctgatgttgatggccagcaagccgttaacgcaatttgttaacagtcacccgacgatcgttattctctgcttaagcttcctgttgatgattggctttagcctggtggcagaaggtttcggcttcgtcattccgaaaggctacctgtacgctgccattggtttctcggtgatgatcgaggcgctcaatcagttggctatctttaaccggcgacgttttctttccgctaaccagacgctgcgccagcggactaccgaagcggtaatgcgcctgcttagcgggcaaaaagaagatgcggaactggacgccgaaaccgcgtccatgctggtggatcatggtaaccagcagatctttaatccgcaggaacggcggatgattgagcgggtacttaatcttaaccagcgtaccgtcagcagcattatgacgtcgcgccacgatattgagcatatcgatctcaacgcgccggaagaagaaatccgccagttgctggagcgaaatcagcatacgcggctggtggttaccgacggtgatgacgcagaagatttgctcggtgttgttcacgttatcgacctgctacaacagtctctgcgcggcgaaccgctcaacctgcgggtgttgattcgccagccgctggtgttcccggaaaccttgccgttgttacctgccctggagcagttccgtaatgcccgcacgcactttgcttttgtggtggatgagtttggctcggtggaagggattgtgacattaagtgacgtcactgaaaccattgccggtaacttaccgaacgaagtggaagagatcgacgcccgccatgatattcagaagaatgcggacggttcctggacggcgaatggtcatatgccgctggaggatctggtgcaatatgtgccgctgccgctggatgaaaaacgtgaatatcacaccattgccgggctgttgatggagtatttgcagcgtattccaaaacctggcgaagaagttcaggtgggggattatttgcttaaaacgttgcaggtagaaagccatcgcgtgcagaaggtgcagattataccgctgcgtaaggatggcgagatggagtacgaggtgtgatggtatcggtcattttacccaatagccgaaaggaataagatgagggaaccgcgccatcggcgatttaccgccgggagcccgggttgccagggtggtggagattgagccaccctggcacgttcaccggcttgagcgttccatagtagcgaggaacatcaagtgaacggaacagccttcgatcttacatattcagaatataatgatgccgccacgaacgcctgatgcgacgctttacgcgtcttatcaggcctacaggactggtcacctggtaacctacatcttctccagcaacttcttcacatctttgccattacgggaatctttattccgctcggcccagtcattcaggcgacgtttcgcttcgtcctgtagatgtttgcgcagtaactgatccacttgcaggctgtaattgagttgctgccagttgccataaacccgcagcggtactggcgtttctttcaggaaatcaatcagtttgctttccccgttccagccacccacgacccgaatatcaaactgggtgtcgcaggtttgatctgccagattcaacatgccttcccctgtcagcgccagcacaggcgattgaccttgcatgtcgtttaacgtcacgacgccatccttcaacgtcaaatcggtggtaaagcggtcaagccgcgtcacgttatcaaagttttcagcggccttcacatcaccgccattacgctctaccgcttgctgaatcatctgctggaagttcatcccttccatgcgcgtgtcggtcatttcgacatgtgcctgtccttgccagttgtggcggaatgcgtcggcatctatgtcagcaccggagaaatcaccagccagtgacatttttccggtcaacgaaatcggatagttaaacgccttcagaatggtaccaatctcaacgttttccagccgtggctggaagtttatccgcggatttattgatgtcgcgtccagcgtgcccggcagtgaaacctgtccaccgttaagtttgccctgcagttgagtaatttccagcaaacccgacttgttggtcatttgcgtggcaacatctgtaaaattcattccgcgccagcgcacgttactggcctgcaacaaaatatcagccgtaaagccttgcagtccctgataggccggttcatcaatacgcgaagaaatgaccgggcgcggcaacgttgattggctctgcccctgctgcgcggcaccgttttcaccattcgcggtttcattaagcgggatgaggttgtcaagattcagttgcgggaattgcagcctcagctgccattccggtttctctgtcagcgtaacctgtgcttgcccgcttagcgtactatcattggcggtcaaactaatttggttaaatgaaaggcgtttatgtgactcctgccactgggcctggaaactcccctgcccctgaataccttgttttggtaaatcggcaccctgcaactgccagttaatttgttcaatagccgccgttaaatcatgcggataatcagaagcatctaccgtaccgttaagggatatcgtgagatcgcgctgatcgcgattaacccgcccggagaactcaaatgaaccacgatgttggggatcttgttccatttgcaggcgaatattgcggattgtcacctgctcgtcatcttcatgctggaacaccagcacgctgtccgccaccttaagactggatatatcaaacgaccatccgcgatcgtctgacagatccggcaaggtattgtcgcgcggtgcaaccggagcgtcttcactgcgcaccgcttccgtctgcggcgtcagttggatcactgccccttttagcatcacctgcttaacgctcagttgatgactcagtagtggtaaaagcgccacgtccagacgcatgttgtcggcgcgaaccagtggctggcttgcgccctgggcggtgagagacattcgcccggagaggatactaagctgcggccagacgtgccaacgcagtggcccgtcgagctgcaattgataaccgctacgtgcagcaacttgcttgaccatatagtcgcggaaatcattcggattcaccagcaacactaacgcagataacccggccaccagcacgaccaggagtatcatcagcgtcgtcagaaatcgtctcatggtatcctcaatgggcctgaattagtctttatcgattcggctggctaccgcgccctgctggttgcgatatttcgcatcttcacggcggttgtaaggtcgcgccgccgggccggaaagcggctcaaagctcagcgcaccaattaacatgcccggacgcagcgccagcggcagcttaccggagttgtagaactccagcacaatgcaaccagaccagcccggatcgatgcggtgcgcggtgacgtgcaccatcagccccagacgcgccagtgaggaacgcccgtccagccagcccaccagatcggctggcagcgtcaccgactccagcgtcaccgccagcgccagctctcctgggtgaagatagaacgcctcgccctcgtcgagaacgatctcatcgctcatcacgcggtcaagcgcggcgctcacttcatctttgggaccgctcagatcgataaacgctgccgtgtgaccacggaaggtacgaaatttattgcccaggcgtacatccaccgtcgcgccgttaatacgctccactggcggacgtgggttgatcgacaaacggccttcatcaagccaggcttcaatatctcggtcacacagacgcatggcattttctcctttcgcgcatcactcccttaacgccaattacgtcaagggcataccaggttatcactgaacggtacacaatttatcaagcttattcaaagaactgacttattttcgctttcaatatatcgatcgcgatgcggtttttcccgccgcgcggcacgataatgtccgcatattgtttagaaggctcaatgaattgcaggaacatcgggcgcacggttttttgatattgcgccatcactgaatccattgaacgcccacgctcgttaacgtcacgcttgatgcggcgcatcaggcagatatccagcggggtatcaacgaaaatggagaagttaagttcgtcacgcaaacgcgcatccgtcagcaacaaaatgccttcgagaatgatgaccttcttcggctcaaccgtcaccgtttctttcatacgcgtatgttcaacatagctgtaaaccggcaggtcaattgccgagccgcgtttcaacgcttgtaaatgcnnnnnnnnnntgtgatccatcgcgctgggatggtcgtagttggtcttaacgcgttcttccatcgacagatggctttgatctttgtaatagcagtcttcgggaattacgccgatgtgttcatcaccgacttgctcacgcaattcacgataaagggtactggcaataagactcttgccggaagccgatgcgccagcgataccgataatgacgcactgatgagactgatcagtcatatatttagcgacctgattaacctggatgttaggaagggggcgacgaagcgccaaacgcggcaattatagggatttcatccgtctgataccagtcgaatagcgttgccgcgcgctcagagttaattgttgacaaagaattcccgggggcaaattacgttgatcagttttatgtaaggtaaaaaatgttatacgcagttgcgcaaattatccgcctttacgtcactttatgagcaattcgcatataaaatgtaaaacttttgtactagcataaacacagaaacgaatactggcgaccaggtcttgcggataaagcggtaatgagcaaacaatcacagcatgtattaattgccctgccccacccgctgcttcacctggtcagtttaggtttagtctcgtttatctttacccttttctcgcttgagctttcgcagtttggcacccaactcgccccactgtggttcccgacgtccatcatgatggtggcgttttatcgccatgccgggcgcatgtggccgggaattgcgctgagctgttcgctgggaaatatcgccgcatccatcctgcttttttccaccagctcgctgaacatgacctggacgaccatcaatattgttgaagccgtggtcggggcagtgctgctacgtaaattgctgccgtggtataaccccttgcaaaatctggctgactggctgcgtctggcactcggcagcgccattgttccgcctctgttggggggtgttctggttgtcctgctgacgcccggagacgatcctctcagggcatttttgatatgggtactgtcagaatccatcggcgctctggcactggtgccgctgggattgttatttaaaccacactatctgctgcgccatcgcaacccacggttgctttttgagtcgctgctcacgttagccatcacactgacgttaagctggctttcgatgctgtatctgccgtggccttttactttcattattgtgctgttgatgtggagcgccgtgcgtctgccacgaatggaagcctttttgatcttccttaccacggtgatgatggtgtcgctgatgatggccgcggatccctccctgcttgctacgccgcgtacgtacctgatgagccatatgccgtggctaccgtttttgctgatcctgctgcccgccaacatcatgaccatggtgatgtatgcctttcgtgcggaacgcaaacacatttccgaaagcgaaacccactttcggaacgcgatggaatattccgctatcggtatggcgttagtgggcaccgagggacaatggctgcaaaccaacaaagcgctctgccagtttctcgggtacagtcaggaagagctgcgcggactcacctttcagcaactgacctggccggaggatctcaataaagatctccaacaggttgaaaagctgataagcggtgaaataaacacctattcaatggaaaaacgctactacaaccgcaatggcgatgttgtctgggcgttgcttgccgtctcactggtgcgccacacggatggcacgccgctctattttatcgctcagattgaagacattaacgagctaaaacgcaccgaacaggtcaatcagcaactgatggagcgcatcactctggctaacgaagcgggcgggattggcatctgggagtgggagttgaagccgaatatttttagctgggataagcggatgttcgagctgtatgaaattcctccacatatcaaaccgaactggcaggtgtggtacgagtgcgtgctgccggaagatcgccagcatgccgaaaaagtgattcgtgattcgttgcaatcacgctcgccctttaaactggaatttcgcattaccgtaaaagacggtattcgccatatccgcgccctcgccaaccgggtactgaataaagaaggcgaagtcgaacgtctcctcggcatcaatatggatatgaccgaagtgaaacagcttaacgaggcattgtttcaggaaaaagagcgcctgcacattacgcttgattccatcggtgaagccgtgatctgtattgatatggcgatgaaaattacctttatgaatccagtggcggagaagatgagcggctggacgcaggaagaagcgttaggtgttccgctcctgacggtgttgcatattacttttggcgacaacggaccattaatggagaacatttacagtgccgacacctcacgttccgcgatcgagcaagatgtggtgttgcactgtcggagcggcggcagttacgacgtgcattacagtattacgccgttaagtactctggacggcagcaatattggttcggttctggtgattcaggacgttaccgaatcacgcaaaatgctgcgccagctgagctacagcgcctcccatgatgcactgacgcatctcgccaaccgcgccagttttgagaaacaactgcgtatcctgctgcaaacggtaaacagtacacatcagcgacatgccctggtgtttatcgatcttgatcgctttaaagcggtgaatgacagcgccgggcatgcggcgggtgacgctttgctgcgcgaactggcgtcgttaatgctgagtatgctgcgttccagcgacgtgctggcgcgactcggtggggatgaatttggtctgctgctaccagactgtaatgttgaaagcgcgcgttttatcgctacacgcattatcagtgccgtgaatgactatcactttatatgggaaggccgtgtgcatcgggtaggtgccagtgccgggattaccttgattgatgacaacaatcatcaggcggcagaagtgatgtcgcaggctgatatcgcctgttatgcctccaaaaatggtggccggggccgggtgacggtttacgaaccgcagcaagctgccgcacatagcgaacgggcggcgatgtcgcttgatgaacagtggcggatgattaaagagaatcagttgatgatgctcgcccacggtgtcgcttcgccacggatcccggaagcgcgtaatttgtggctgatttcacttaagctctggagttgcgaaggcgagattattgatgaacaaacatttcgtcgtagcttcagcgatccggcgcttagccatgctcttgaccgccgggtattccacgaatttttccagcaggccgcaaaagcggttgccagtaaaggcataagcatctccctccccctttccgttgccggtttgagtagcgccacgctggtgaatgatctgcttgagcagctggaaaatagccctctaccaccacggttattacatctgattattccggctgaagcgattttagatcacgcagaaagcgtgcaaaaactgcggctggcgggatgtcggatagtgctcagccaggtgggccgcgatctgcaaatcttcaactcgctgaaagcgaatatggcagattacctgctacttgatggtgagttatgcgccaacgtgcagggtaatttgatggatgagatgctgattacgattattcaggggcacgctcagcgactcgggatgaaaaccatcgccgggccagtcgttttacccttagtgatggatacgctttctggcatcggcgtcgatctgatttatggtgaggtgattgccgatgcccaaccgctggatttgctggtgaatagtagttatttcgcgattaactgaggcgtgcttccccatcgcctgatgcgacgctaacgcgtcttatcatgcctacaaatcgctcattccccaggccggataaggcgctcgcaccgcatccggcgaccaacgtcatgcttcgtctggttgccagccttccgtataccagatatgcaacagcgcataagaacgccagggcttccagcgctcggcataacggcggatttgcgccggtgtcattcccggaaatcgctgtttaatcagataatcatccggcaggaaaacatctttcgcctgccagccacgcaaagcaaaataattcgccgtccagcgcccgatacccggaaaagtttgcagcgttttcatcgcctgctccacatcgcccggtattgtcattggtaaggtgccctccagcgccgcatttgccagatgaatcagcgcctctgcccgtttcaacggcatacctaacgcttttaatgcctgcgggtctgctgctgccagccgctgaggcgtcgggaagcagatatactccggaaaatcatccagccgttcgccataaagctgtgccactctggcggtcaattttgccgccatcgccacgctcaccagttggcctaaaatcgcccgcacgccctgctcaaaagcatcaacacagccgggtaaacgcaatccgggccgcgccgcgcctaacctgcccaacgcaccgttaacaatttgtgggttacattgcagatcaaacaggcggctcattttcgccagacactctgcggcaacaggttctaaacctgcacttaaatttatgtgcagagtatggcgggctatatccggaatagcagtcaccacgccgcgatattcgcccaccgccagactacgggcataataactgtccgcgaccgtttccacactgctcaccgcacgggcggcgagaaatcccaacatccacgaccagtcatacggcggctgccagttcagggtatacatcgcatctccttattcatccgctttcagcataaacgttattcagacgctgcgctttgctttcatattccggttgtcgcgacggcaacatttcgctaaagtcacgccccttcttcaccggcatggggattatttcgtgtttattggttttgattacggtacagcaaactgttcagtggcggtcatgcgtgacggtaaaccgcatttgctaaaaatggaaaacgacagcacgctgctgccttcaatgctttgcgcgccaacgcgtgaagcggtaagcgaatggctgtaccgccatcatgatgttccggcagacgacgatgaaacgcaggcgctgttacgtcgggcgattcgttataaccgcgaagaagatatcgatgttacggcgaaaagcgtgcagttcggtctttcctcactggcacagtacattgatgatccagaagaagtgtggtttgtgaaatcaccaaaatcgttcctcggtgccagcggcttaaaaccgcagcaggtagcgctgtttgaggatctggtctgcgcaatgatgttgcacattcgccagcaggcgcaggcacagctgccagaagcgattactcaggcggtgattggtcgtccgatcaacttccaggggctgggcggtgatgaagcaaacacccaggcgcaagggattctggaacgcgcggcgaagcgtgccggattcagggacgtggtattccagtacgagccggtcgcggctgggctggattacgaagccaccttgcaggaagaaaaacgggtgctggtggtggatatcggcggtggtacgactgactgttcattgctgctgatggggccgcagtggcgttcgcgtctcgatcgtgaagccagcctgctgggtcacannnnnnnnnngccgtattggcggtaacgatctggatatcgcgctggcgtttaaaaacctgatgccgttactgggcatgggtggcgaaaccgaaaaaggcatcgccctgccgattctgccgtggtggaatgcggttgccatcaacgacgttcctgcacagagtgatttctacagtagtgccaacggtcgtctgcttaacgatctggtacgcgatgcccgcgaaccggaaaaagtggccctgttacagaaagtctggcgtcagcgtttaagctatcgcctggtgcgtagcgcagaagagagcaaaatcgccctttcaagcactgcggaaacccgcgcctcactgccgtttatcagcgatgaactggctacgctgattagccagcaagggctggaaagcgccctcagccagccactggcgcggattctggaacaggtgcaactggcgctggataacgcccaggaaaaaccggacgttatctacctgaccggcggtagcgcccgttcgccgctgattaaaaaagcgctggcagaacagttgccgggcattccgattgcaggcggcgatgactttggctccgtcaccgccgggctggcacgctgggcagaagtggtatttcgttaaaagaaaatggctcagcagcggcttaaatcagcctgcgcctgagccagtttttctgccgcctgacgtaacggttccatcaacggcatggtccgtgctggagcatgaaggcggaatcgctgcaactctgtcgcgccgacagtcaacgtcgattccagccgatgtcgtttggcggtcattttcgccattaccgcttgtctgtctgctggcgttaccgcttcattcggcctgaacacaaaacggcgttcgcaacttgctttccagtcgataactgcctgggtcagatgatcaccaaaccctttcacttgcttaaccccacgacgggtaacatccgctgctgtttcaataccaaaggaccgtaacgccgctttacgcgcagggccaacgccgggaatagaggcaacatcaataaaaaatccctccagaaacttctgcttctgccgttcccttgcggtgtcgtgaagtgctgccagagcacgtttttcttcttccggtaacccgagcatttcgtccttcattttttcgagcatcgtccgtttggcgataaaaccttccagcccgcccaactgttggatctggctgactaaatggtcatagtccattttcgcgcgattaaatgcctcacggcgttgctgaacttctgctttgtacgctttgcttgtcagactgccaataatccagatagccgacagcacaggaaccaaaataatataacgcggttctgcctgaaggccgcaaagcaacagcgataacgctgacagtgcgatctcaatcagaatgatgtattcgcgccgtaacaggcctaaaggaagcggcctgccagtcggttggaaatgatcgggtaatggcaattgcaatgctggcggtgctactgacgccatcaccatcgcccagactttcgccagcacaaaatcaccgctggtggtaatgacctcttcgccgagatcaataaaatagataacgccttgattatccagcgcacaccacgggcagtcggtcaaatgagcgggataaacatgcattgccgaaacgggacatttctttaactgttggcgcagagaatcaagtgccgctacccacgctttagccgtcggacgcccggttgccacgccactttccgtgaatgcctgctgaaacatggcttcaacatcactcggtaacatcgatagcggaatcgatcgtggcggcggttttaaaccacgtcgctgattatctgacgcgtaggcataacggaaatgggtaatatccgtctccagcgcattacccgcatcagagataagcggcacaccagaataaggatgccggccaccaaacaagacgtgaaaaatcagcaacgcaaggccaaaattatcgtgattttctgtgcgttcaaagccgacaaatgacgacaaggtttgtagctctggcggcgtaaaatgcgacacgccgacttcgcataaatgcagtgtgccattggcgttaatctgaaaggagtcgctatcaatcagtaccactttgctgtcgcgacctaccataaaactgttctggtttacgtcacccacgacgtgcccgtgctcgtgaaccgtagcaaaagatgaagcaatattgcgcgcaacatagagtagaaaatcccacgcacaatgagggtgactctggcgacgatgtgccgggctatagatcatatgaatcggttctttaccagaaacttttggcatcataaaaccgataacttttccgcctcgtccaccgtgaagcgttgcctgcggccaggcgacataattcaacaactgcgcgtcagctgtcgcagccataaaggcaagtttgtcctgttttaaggcgggtggcggcgtgtgataaatcttggcgacgctatcgacaaactcctcgatatcataaaccgcgccttcaccacctttgcccagttcacggccaagagtggtcaattcacctgtcgatgtaaatacttttatat

SEQ ID NO: 220 - DNA, 25379 bp, Escherichia coli
  source 1..25379: mol_type = genomic DNA
cgactgtttaatttgcgctttataacggcgtaaaaaacgctggcgattcaccatgcttttgtttttgccgttcagacgccggtcaataaaccaggtcatatgccccccgtactacatttgccaactgtatgctacgcctgtgttgccatttctctggcccacggttcgctgtcgttgtaggcccggtagcatgtgtaccgggccagggttgttaagacgatttacgtacgcgcaaataccattcgcacagtaaacgcacctgtttacgggtgtagcctttttccatcatacggtcgacaaagtcgtcgtgtttcttctgctcgtcggttgacgttttggcgttaaacgagataaccggcaacagctcctcggtattggagaacattttcttctcgataaccgttcgcagtttttcatagctggtccagttcggattgcgtccgctgttattcgctctggcgcgcagtacgaagttaacaatctcgttgcggaaatcttttggattactgatccccgccggtttctcgattttctccagctcggcgttaagagactcgcggtcaaacagctgcccggtatccggatcgcgatactcctgatcctgaatccagaaatccgcgtaggtaacataacggtcgaaaatgttttgcccatattcggaataggattcaaggtaggccgtctggatctctttgccgataaactcggcatatttcgggatcagataacctttcaggaactccagatagcgttctgcctgctcttgtgggaactgctcgcgctcgatctgctgttccaggacgtagaacagatggaccgggtttgccgccacttctacatgatcgaagttgaacacgcgggagaggatcttaaacgcaaaacgcgtcgacagaccgttcatcccttcatcgacaccggcgtagtcacgatattcctgatacgacttggctttgggatcggtgtctttcagactttcgccatcataaacccgcatctttgaataaatgctggagttttctggctctttcaggcgcgaaagaatggaaaaacgtgacagtgtttccagcgtgccaggggcgcatggggcgtgagtcaattcactgtgattaagcaatttctcgtagattttgatctcttcggaaatgcgcaagcaatacggtaccttcacgatgtaaacacggtcgaggaaggcttcgttgtttttgttattacggaaagtgacccattcggattcgttcgagtgggcgaggataatcccgttgaacggcagggcggagataccttccgtcccgttgtagttaccttcctgggtggcggttaacaagggatgcagcacttttatcggtgctttaaacatctcgacaaattccatgatcccttggttggcgcggcacagcgcaccggaatagccgtaggcgtccgggtcattctgcgcgtagtgttcgagtttacgaatatcgactttcccaaccagcgcggagatgtcctggttgttctcatcaccgggttccgttttggcgatagcaatttgttgcagaattgacggccagaccttcactacccggaacttagtgatatcgccaccaaattcatgcaggcgttttgccgcccacggcgacatgatggtgccgagataacggcgaggaatgccatactctttttccagaatctgagcatcttcctgcggattgaaaagacagaacggatgatcgttgaccgggctacgctcaccgttggcgctcaatacataaatcggtacgagctgcattaatgatttcagtcgctcagcaagcgatgatttacccccacccacaggccccagcagatacaggatttgtttcttctcttccagcccctgagccgcgtgtttcagataagagacaatctgttcaatcgcgtcttccatgccgtaaaactcttcaaacgccggataacgtgcaatgacccggttagaaaagagtcgagaaagtctgggttcctgggctgtatcgaccatgacaggctcaccgatagccatcaatagccgctcagccgcgttggcataagcactgcgatcttgccgacaagtggtaagaaactcctgcagtgtgaactcttcgtccttggcagcttcatatcgctggcgatagtgatcgaatatattcatggtatgccgtcctttcgttttttagcacaggttaagagccgttcatatgaatagtagaggctcccggaagaggtaaactgaacgacgtctcttgctaaaacacagcaactctcatgccattttatcgacgatgagaacaacgtgcccggtgatacaccttcaaaattaagcgtagatggcaaatggaaaacttgcctgcacggctttcttaatttcaatggcatatcaacaactcatccataaattttgcataattaatgtaaagaccaggctcgccagtaacgctaaattcatttggctgtaagcgcggtgtcatccgcgtcaggaaaattaaacagttactttaaaaaatgaaaacgtaaaaaggttgggtttcgatgtattgacgggtaaactttgtcgcccgctaaacatttgtttaaggaatgattaattgtgaccaaactcaaacttctggcacttggagtgcttatcgcaacgtctgcaggcgtagcgcacgctgaaggtaaattttccctgggcgcaggcgtaggtgtcgttgaacacccatataaagattacgataccgatgtttacccagtaccggtaatcaactatgaaggcgataacttctggttccgtggcttaggtggtggttactacctgtggaatgacgcaacggacaaactttcaattaccgcttactggtcgccgctttacttcaaagcgaaagacagtggcgatcaccaaatgcgtcacctggatgaccgtaagagcaccatgatggctggtctgtcttatgctcactttacccagtacggttacctgcgtaccaccctggctggcgataccctggataacagcaacggcattgtctgggatatggcctggttgtatcgttacaccaacggcggcctgaccgtgaccccgggtatcggtgtgcagtggaacagcgaaaaccagaacgaatactattatggcgtatcgcgcaaagagtccgctcgcagcggtctgcgtggctataatccgaacgacagctggagcccttacctggagctgagcgccagctacaacttcctcggcgactggagtgtttacggtaccgcgcgctatacccgtctgtctgatgaagttactgacagcccgatggtggataaatcctggactggcctgatttctaccgggatcacctacaaattctgataatgcatctttccagggcattttgtgcataaaaacagggcgtcacgccctgttttgcattacggtggtgcaatacctgggaggaaacaatgcaacaaaaaatgattcaatttagtggcgatgtctcactgccagccatagggcagggaacatggtatatgggcgaagatgccagtcagcgcaaaacagaagttgctgcactacgcgcgggcattgagctcggtttaaccctcattgataccgccgaaatgtatgccgatggcggtgccgaaaaggtggttggggaagcattaaccagtctgcgagagaaggtctttctcgtctctaaagtctatccgtggaatgctggcgggcaaaaagcgataaatgcatgcgaagccagtttacgccgtctcaatactgattatctcgatctctacttattacactggtctggcagtttcgcttttgaagagactgttgcagcgatggaaaaattgatcgcccagggaaaaatccgccgctggggcgtttctaaccttgattatgctgatatgcaggaactctggcagctgccggggggaaatcagtgtgccactaatcaggtgctttaccacctcggttcacgagggattgagtacgatctccttccctggtgccagcaacagcagatgccggtgatggcttacagtccattagcccaggccgggcggttgcgcaatggactgttaaaaaacgcggtagtcaacgaaattgcacatgctcacaatatcagcgcggcacaagtattgttggcgtgggtgatcagtcatcatggtgtgatggcgattccaaaagcggccacgattgcccatgtccaacaaaatgcagctgcgcttgaggtcgaactttcgtcagcggaattagctatgctggataaggcatatccggcaccaaaaggaaaaactgcgctggatatggtgtgatgttgatacgtgccggatgcatcgcacccggcacacaacattaacgcaaattaacgtttggcaacgcgaatggattgcgccagatgtgctggtttctctttggtgactttttgcgtttctgaagcgtaagccgtttctacacaaacaaaggtcttgtagccatcgtccggcatgtcgcccatgctaactgaaagcgccggtcccgggttccagccgacaacgttcagatgatgctggtggcctacggcgataatacgattcagcgcttcatcattaatcacgctgcaatcttgcggattcagatacacgcgatcggtacggtcagggaaggtctgaataccatcggtcagtacatcttctttcgcgtcattcactttatcaatgaagcgatcgcccagcccactgacgcttaccttagcgatatcacccacgttaaagtaggtatgcagagcagaggtggtttcaaattcgccgtgtgcttcaagatcgatttcacaggttttacccacgcggaaatgcgctaacagcgtaaagtcgtgcggccagaattttttcgtctcttcgctttgtgtcaattcaaaagtcagcgctacgccatcagcatcttcacgatgtgatttcagcgtccacggcaggttgcgggcaaaaccgtgcgcaggcaggccttgttgtgccgccggaccaaaccacggccagcaaaccggtacgccaccgcgaatagcgacgccatttttgaacggtgtgttgttgctcaaccacagaacttcttcttcacccgcaggtttccacgagagaaggtgtgcgccctgtaatgcaaaagaggcttttacctggggatgatcgaccacaatgaggtccagttcatccagtttacgacgggagaggacaggggagatttgttcgatgaccggaagggcaaaaattttcttaatcatgacgcagtcctttaacttcattttatcaggtaaaaaaaagagcgaccgaagtcgctctttttagatcacagtgtcatctcaacttatttggagatgtgagcgatcaggtccagaactttgttggagtaaccggtttcgttgtcgtaccaggataccagtttcacgaagttgtcgttcagagcgataccagctttagcatcgaacacggaagtgcaaacttcgccgttgaaatcggtagatactacgtcatcttcggtgtagcccagaacgcctttcatttcgccttcagcagcagctttaacggcagctttgatctgctcgtaagttgcagctttttccagacgaacggtcaggtcaactacggatacgttcggggtcggaacgcggaacgccataccagtcagtttgccattcagttctggcagtactttacctacagctttagcagcaccggtagaggacggaatgatgttctgggaagcgccgcggccgccgcgccagtctttgtgagacgggccatcaacggttttctgagtagcggtagtagcgtgaacggtggtcatcagaccttcgatgatgccgaagttatcgttgataactttagccagcggagccaggcagttggtggtgcaggaagcgttggaaacgatgtcctggccagcatatttgtcgaagttagcgcctttaacgaacatcggagtgttgtctttagacggaccagtcataaccactttcttcgcaccagcggtgatgtgtttacgagcagtttcgtcagtcaggaacagaccagttgcttcagcgacaacgtcaacaccaacttcgtcccatttcaggttagccggatcacgttcagcggtaacacggatttttttaccgttaacgatcagatgaccgtctttcacttcaacggtaccgtcgaaacggccgtgagtggagtcatatttcagcatgtatgccatgtaatcagcgtctaacaggtcgttgattgcaacgatctcgatgtcagaacgtttctgagcagcacggaaaacaatgcgaccgatacggccaaaaccgttgatacctactttgatagtcatatattccaccagctatttgttagtgaataaaaggttgcctgtaaaattacaaaaaccttacgcagcgtcaagcggaatcgtgtcaatcattgcgacaaatcaatcctgtgcctaagcattacgcgactgactcgcctcactcttcctttgggcttgagaccacatggggtcggcgccccgaattttaaagggcaattacgataaaaatgtgattttcatcacgatttaggtgcagccatttcgtcgagatcaagtttaggacaaaattttgccagttggtgttaatgttttgttagaatcagtcacgtaatgtgagcacgattaaagtgagatgtgagcaaatggctaataaaccttcggcagaagaactgaaaaaaaatttgtccgagatgcagttttacgtgacgcagaatcatgggacagaaccgccatttacgggtcgtttactgcataacaagcgtgacggcgtatatcactgtttgatctgcgatgccccgctgtttcattccgaaaccaagtatgattccggctgtggctggcccagtttctacgaaccggtgagtgaagaatccattcgttatatcaaagacttgtcacatggaatgcagcgcatagaaattcgttgcggtaactgtgatgcccatctggggcatgtctttcccgacgggccgcaaccaacaggcgaacgttattgtgttaactctgcttctttacgcttcactgatggcgaaaacggcgaagaaatcaacggttgaaaaaacgattcagcaacttattccacaggagcggaaaaattatgaatcttgatgacattatcaacagcatgacgcctgaggtataccagcgtttgtcgaccgccgttgaactggggaaatggcctgatggcgttgcgttgaccgaggaacaaaaagagaattgcctgcaactggtgatgctgtggcaagcccgccataataccgaagcacagcatatgacaattgacacaaatggtcagatggtcatgaagagcaaacagcagttaaaagaagattttggtatctcagcaaagcctattgctatgtttaagtgaatgagttatctagtatttaagcctgttattaagggagggcaaatatacttgttaggacgtcgtgttttagctgcaagtaggttaaatgcaacactgacaagtattatctggcctacaatgtcattgaggaaatgtaggccagagatgaattcaactaatattacccctgcgtctcttcccagtctgccagcgtatatagcgttgccccagctgctgacatctccataaacgcgtgcgcactgtcctggggctggatattcacgccacgacaaccatcggtaatcacgttcaccttataacctaactgtaacgcgtccagcacggtaaacttcacgcaatagtcagtagccaggcccataacgatcaattcatcgatttcatgatcgcgtaaccagtcatcgagagaggttttctgccgacggccgttatcaaaaaaggcactgtaactgtcaactaaaggattttcgcctttatggaacaccgctgcgatcgctttttggttcagtaacggatgtaattgtgcgccttcactgttctgcacacagtgatctggccagaaggtttgtggcaaaccgtcgagttggcctggcgtataaggctctacaccgtgctgactggcaaaactgccgtgattcgccggatgccagtcctggctggcgataaccgcttctccgcgcgactggcaccagtcaataaggcggttagcaacctccaccgtactgtcaccttccggtacggcgagcgcgccaccagcacagaaatcattttgtaaatcgaccagtaacagggcgcgatggggcattgcagtctccttaatcatccggcgtcagttcgccgcgcaggttttggctcatggccttgcgaatggtttcagtatccagttcctggctcagcaggtaatgcagtttggttagcgtggcttctacagtcatatctgcaccgccaataacgccggcatgggcgagggcgttaccggtggcataaccacccatattcactttaccggacatacattgtgtcaggttgaccaccacaataccgcgatcgctggcttcttgtaattcctgcaggaaggctttgttttgtggcgcattacccacgccataggagcgcagaatcaatgctttcaccggttggcgcagaaaattgcgcacgacatcagcagaaatccccggataaatcgtcactacgccaattggttgtggcgtgattggatgaacgattaattccccttcaccgtgcggggcgggtggcgtattcaaacgacgaatatggataccagcttccagtaacggaggaaggtttggagaggcaaacgcatcaaaaccatcggcatgggctttggtagtgcggttgccgcgatacaatcggttattgaaaaagagcgttacttcgttgatcggataattcgccgcaacgtacaacgcattcagcagattaatttgtccgtcagagcgtaactcagccagcgggatttgtgaccctgtcacaatgaccggtttaccgagattctcgagcatgaacgacagcgcagaggcggtatacgccatcgtgtcggtaccgtgtagaatgacaaaaccatcatagtcgtcatagtgcgctttaatatcttcagcaatatgctgccagtcttccggcgtcatatcagaagaatccatcaacggcgtatattcatgaatggtgaaatctggcatctccgggcgatggaattccggcatcagcgccagttggcgttgtagatgacctgacaccggaatataaccctgctcggaacgctgcatcccgatggtcccgcccgtgtaggcgacgtaaattgatttcttttgcatgatattgatatgaatgatatcgaaagagcaaaagtatatacgtgaggcaggaggagcgcacctgatactatgcggataaggaaatatgggtcgagacagcgggaagaggattcgtcgaggtaaaaaataatgtggccgacgatctgtcggccactcagtacaagacttaacgcacgttggcgcaggtcaggcaaaacgcataacggttttgtgggtcgttaaacgcggccagcttgtcgctttcacttttaacggtagaggctaccgaggcaagcggtgcaggtaacatggcctggaacgcatctggcaacattgcccggacagaaccagacatgttgtccatcactttgtcgaagaaggtcggttcatcaacgtagtattccagatgccactgtttcacttttgccagctctgctgctttggcaaccgcatcatcgaaatccccgagactatcgaccagcccgttagcttttgcatcctgaccggtccagacgtggccctgggcgattttatcaatttgctccggcgtcgaatgacgcgcatcagcaaccagcgtgataaagcgtttatagccattctcaatgcttaattgcatcatctgctgcgcttccggcggcagtgccctggtgatagaaacatccgccagcggtgaagttgagacaccatcagtatgaacaccaatcgaatccagactattttctacggtggtgatcacgccgaagataccgatagaaccggtcagggtgctggggttagccacaatgtaattagctggcgtggaaatccagtaaccaccagatgccgccatgccgcccatcgatacaaccacaggcttacccgctgcccgggctgctgccagttcagcgcgaatcacttcagacgcggtaacgctgccgcctgggctattaacacgcaggacaatcgctttcactttcgggtcaaggcgagcgtcgcggatttgtgccgcagtggtatcaccgccaacattcccctgagtttcctcgccatccataattgcgccattagcgaagacgacaccgatgctgtcaccggtatctgccggcgttttcaatgcgtaatcgtaataactgatgtcgcgataatttttatcagtcttactccagccgaactctttggtcagagctttttcgatttcggcactcgatgccagtgcatcgaccagcttgttttccagtgcatatttcgcggtatcgccaccggttttggttaaaccctcaagcaacccttgcgcgccagggaatacctgctgagcagggatctgccggttagcggcaacagtattcagatagttttgccacagctcaccaatccagcggctgtcagcttcgcgggctgccggtgacatatcatcacgaataaacggttcaacggcagatttatacgtacccacgcggaacacatgggtggaaactttcagcttatccagcaacgatttgtagtacagaccgttggtagcaaaaccgtgcagatcaaccacgccttgcggtgacagccaaattttattggcgaaactggcgagataatattgcccctggctgtagttctcgccaacggcataaaccggtttcccgctgtcacgaaactctttcagggctttgccgatgtactgcatagacggctggtcgccgcctgcgaagtttttcagatccatcacgataccggtgatattgcggtcgtccttcgcctggcgaatggtgttgacgatatcaaacagtgagttttcctgcagacgatcggaactggcaccaagcagctggcggcttaatttactaaaccgctgagaactgtcgggtttatcgacgatcacaccagaaatgtccagcagcagtgcgccacgactggccgtttctttcgaatcaccaccactgacctgcatccagatccccacaccaaccagtacgaggaaaataaagaacaggttaagtaccatttcacggacgaaattcagcagacgccacgtccatttaaaaaatccggcaataaatcgccaaagggttcgcatgtattctcccaacttaaggtcacacctgtcacaggcgcaatagatgtggttatcgtaatgacccaaccggcacttgtcagcaggaattgcggactgtgctgtaacaaaatccactctcgtgttaattttgtgaataaatatcacgacaggagttaatcaaatggatgcactcgaactattgatcaatcgccgtagcgcctcccgcctggctgaacccgcgccaacgggtgaacaactgcaaaacatcctgcgtgcgggtatgcgtgcgccggaccataagtccatgcaaccgtggcatttttttgtgattgaaggggaagggcgcgagcgtttcagcgccgtactggaacagggggcgattgctgccggtagtgatgacaaagctatcgacaaagcccgtaatgcgccgttccgcgcaccgctcatcatcacggtggtggcgaaatgcgaagaaaatcataaagtcccgcgatgggaacaggaaatgtctgccggatgcgcggtcatggcgatgcaaatggcagccgttgcccaaggatttggcggcatctggcgcagtggcgcattaactgaaagtccggtagtgcgtgaagcattcggttgccgtgagcaggataaaattgtcggttttctctacctcggcacgccgcagttgaaagcatctacgtcgattaacgtcccggacccgacgccgtttgtaacttatttctgataattgtcgcgaaactgtctggattgtgagcaaaggcgcaggaattcagacactctcacttatcacttcacggaatgagggttaccatacccggattgcattgacaggagatgtccatgagcgagaactcgattcgtttgacccaatacagccacggagctggttgcggctgtaaaatttccccaaaagtgttggaaaccatcctgcacagtgagcaggcgaagtttgttgatccgaatttgcttgtgggtaatgagacccgcgacgatgcggcggtgtacgatctgggcaatggcaccagcgttatcagtaccaccgacttctttatgccgatcgttgataatcctttcgattttggccgcattgcggcgactaannnnnnnnnnatcttcgcgatggggggcaaaccgattatggcgattgcgatcctcggctggccgattaacaaactttccccagaaattgcccgcgaagtaaccgaaggtggacgctatgcatgccgtcaggcgggtattgcgctggctggcggtcactccatcgatgcgccggagccgatttttggtctggcggtaacggggatcgtaccgaccgagcgggtgaagaaaaacagtaccgcacaagccggatgcaaactgttcctgacgaaaccgctggggatcggcgttcttaccacggctgagaaaaaatcactgttgaaaccagaacatcagggactggcgacggaagtgatgtgccggatgaacatcgcaggtgcgtcctttgccaacatcgaaggcgtaaaagcgatgaccgacgttactggttttggtctgctgggccatttgagcgaaatgtgtcagggcgcaggtgtgcaggcgcgcgttgactatgacgcgatcccaaaattgccgggggttgaagagtacattaagttgggcgcagtgcctggcggcaccgaacgtaactttgccagctacggtcatctgatgggtgaaatgccgcgtgaagtgcgcgatctgctgtgcgatccgcaaacttctggcggtttgctgctggcggtcatgccggaagcagaaaatgaggttaaaactacagccgccgagtttggcattgaactgacggcgattggcgaactggtgccagcgcgcggcggtcgtgccatggttgagatccgttaattcaatgcggttgtttattgccgaaaaaccgagtctggcgcgcgccattgctgatgtcctgcccaaaccgcaccgtaaaggcgatggctttatcgagtgcggtaatggtcaggtggtgacctggtgtatcggtcacctgcttgagcaggcgcagccagacgcctacgacagccgctatgcgcgctggaatcttgcggatttgccgattgtcccggaaaagtggcaattacagccccgaccctccgtgaccaaacaacttaacgtcatcaaacgcttcctgcatgaagccagcgaaatcgttcacgccggggacccggatcgtgaagggcaattgctggtggatgaagtgctggactatctgcaactggcaccggaaaagcgccagcaggtgcagcgttgcttgataaacgacctgaacccgcaggcggttgagcgggcgatcgaccgtcttcgttccaacagtgagtttgtgccattgtgcgtttctgcgctggcgcgagcgcgtgccgactggctgtacggcatcaatatgacccgtgcgtataccattctcggtcgcaatgccggttatcagggcgtactttccgtgggacgcgtgcagacacccgtgctcgggctggtggtgcgccgcgatgaagagattgaaaacttcgtggcgaaagacttctttgaagtcaaagcgcatatcgtgacacctgccgatgagcggtttaccgctatctggcaaccgagcgaagcgtgtgaaccgtaccaggatgaagaagggcgcttgttacatcgtccactggcggagcatgtggttaaccgcattagtggtcaaccggctattgtcaccagctataacgataaacgggaatcagaatccgcgccgctgccgttttcgctttcggcgttgcagattgaagcggcaaaacgctttggtctgagcgcgcagaacgtgcttgatatctgccagaagctgtacgaaacacacaagttaatcacttatccgcgttccgattgtcgctatttgccagaagaacattttgccggacgccacgcggtgatgaatgccatcagcgttcatgcaccagatctgttgccgcagccagtggtagatccagatatacgcaaccgctgttgggatgacaaaaaggtcgatgcgcaccacgccatcattccgaccgcacggagttctgcgatcaacctgacggagaacgaagcgaaggtctataacctgattgcccgtcagtatctgatgcagttctgcccggatgcggtgttccgcaagtgtgttatcgaactggacattgccaaaggcaaatttgtcgctaaagcgcgttttcttgctgaagcaggttggcgcgcgctgttaggcagcaaagagcgcgatgaagaaaacgacggcacgccattgcctgtggtggcgaaaggcgatgagttgctgtgtgaaaaaggtgaagtggtagagcggcaaacccagccgccgcgccattttaccgatgcaacactgctttcggcgatgaccgggattgcgcgctttgtgcaggacaaagatctgaaaaagatccttcgtgcgaccgatggtctggggacagaagcaacccgtgccgggattattgaactgctgttcaagcgtggttttctgaccaaaaaagggcgctatatccactctaccgacgccggaaaagcgttattccattcgctgccagaaatggcgacgcgaccggacatgaccgcgcactgggaatcggtgctgacgcaaatcagcgaaaagcagtgtcgctatcaggactttatgcagccgctggtggggacgctatatcaacttattgatcaagccaaacgtacgccggtgcggcagtttcgcggcattgtggctccgggcagtggtggcagtgctgataagaaaaaggctgcaccgcgtaaacgtagtgcgaaaaaaagtccgccagcagatgaagccggaagcggggcgatagcgtaagcgagcgaatctttcgtgctattcgagtcatattctgaaatatccagcggatcaagaaaattcgttggatattttttttgcatggataaaattatcgcctctaaagtatgtaataacagggaatgtgatgaaaaaagttttattacaaaaccatcctgggagcgagaagtattcttttaatggctgggaaatatttaatagtaattttgaacggatgattaaagaaaataaggccatgctgctttgtaagtggggggggtatttaacatgtgttgtcgctgtaatgtttgtattcgcagcgataacatccaacggtttgaatgaaagaggcctgattactgcgggatgctcttttctttatctattaattatgatggggcttattgttcgggccggttttaaagcaaaaaaagaacaactgcattattatcaggctaaaggtattgagccgctcagtatcgagaagttacaggcgctacaattgatcgcaccttatcggttctatcataagcaatggtctgaaacgctggagttctggccgcgaaagcctgaacctggcaaagataccttccaatatcatgtgcttccctttgactcgatcgatatcataagtaaaagacgcgagtctttagaggatcaatggggtatcgaagatagcgaaagttattgtgccttaatggagcattttctttctggcgaccatggagccaatacctttaaagcaaacatggaggaagccccagagcaggttatcgccttgttgaataaatttgctgtttttccctcagactatnnnnnnnnnngcgctaataatcgctccggtaaatcctcggcgaagctaatatgggcggcggaattatcatggatgatctcgatatcaagcacagcttttcaaaacgggacaattgaagaagaactggcctggcattatataatgcttgcttctcgaaaggcgcacgagttgttcgaaagcgaagaagattatcaaaaaaatagtctaatgggatttctttactggcatatctgctgctatcgcagaaagttaacggatgctgaacttgaagcgtgttatcgttacgacaagcagttttgggagcactacagtaagaaatgccgttggcccataagaaatgttccctggggagcatcatccgttaaatactcataaacgcctgaaattttgccgggggcgctgcgcttgcccggcctacattagagcgtaactgcaatgaattgtgcccatttgtaggcctgataagcgtagcgccatcaggcatttacaacttaaatcacaccctgcgccagcatcgcatcggcaaccttcacaaaactggcaatgttcgcgccctgcacgtagttggtttgctcaccttcaccaccatgctcaacacaggcatggtggatatccagcatgatgtgatgcaaacgtgcgtcaactttctcggctttccagcccaggcgcgcagcgttttgcgccatttcaaggcctgacgttgctacaccgccagcattagccgctttacccggtgcaaacagtacgcctgcctgctggaacagttcagtcgcttcgatggtggtcggcatatttgccccttcggcgacggctttaacgccattggcgataagctgatgcgcggcgtcaacatccagttcgttctgggtggcgcaaggcagggcgatatcaaccggtacagaccacggctgttggccttcgagatagaccagaccaaattctttggcgtaatctgccactcgaccatcgcggctggctttgatttcgataagacgtgccagtttctctttcgtgaatccgctttcatcaactacagtgccgctggagtctgacgcagtgatcacacgagcaccaaattccatcgctttttcgatagcgtactgggcgacgttgccggagccagaaacggaaacgcgcatcccttcaaaacccataccgtggcgttttaacattgcttctgtgaaataaaccagaccgtagccggtagcttccgggcgaataagactaccgccaaatgaaaggcccttaccggtgaagacgcaggcggtattgttggagagctttttcatcatccccgccataaagccgacttcacgaccaccaacgccgatatcacctgccggaacgtcggtatccgcgcccagatgacgataaagctcggtcatcagcgcctggcaaaaacgcatcacttcgccttcgcttttacctttcgggtcaaaatcgctaccgcctttaccaccgcccatcggcagggtagtcagggcatttttgaaggtttgttcgaagccgaggaatttgagaatggagaggttaactgacggatggaagcgcataccgcctttgtacgggccgatggctgagctgaactgcacacgccatgcacggttgacctgtacctggttgcgatcatcaacccataccacgcgaaactggatcacgcgctccggttcaaccagacgctccagtaatgacatctggcgatattttggattttgttcaagaaaaggccagagtgtggtcattacttcacgaacggcttgcgcgaactcggtttgattcgggtcgcgcttttggacatggttgaggaatgactccagagaatatgtctgatccatagatataaaacccttatatattaatacgattgtgcttatgttgtttatgtgatgtgcttttgcagttttcgactataccatcaagaatgtgacggtaagcaagaaaaaaatgacccaggaaagcaaattaataacgagagtaatctcataaccaaatgcgataactcagacgctaaagttttgccacccggctaccgttatcagtagcagagacaataacgttaaggagttccctgtgagtcgagcattgttcgccgtagtattagcatttccattaattgcactggctaacccgcattatcgtccggacgtggaggtaaacgtaccgccagaagtgttcagttcaggcgggcagtcagcgcagccctgtactcagtgctgcgtttatcaggataaaaattattctgaaggcgcggtaattaaagccgagggaatactgctgcaatgccagcgggatgacaaaacccttagcactaatccgctggtctggcggcgcgtaaagccataaacgactctaataatggaatgtcagcaggggccagcggatattgcagcgcctcttcaggtgagcaccagaccagcgcctgatgttcatgtgcctgtaacgtcccgtggaagtcgggtacgtgccaggcatgaagatggataatccggcccgaaacttctcgctgatggctggtaacatactcacccacagttgcttcgatgcccagttcttcgcgtaactcacgcaccagcgcctgccgctggctttcatccggctcgactttaccaccggcaaactcccataatcccgcctgatcgctctgggcggggcgttgcgcgagtaaaattttgccatcacgttcaatgatggcggcaacaacttcaatcattttcataaattacacacgggcagataagcgaaaaatgccataatatccgcactgttgctcaatcagaaaggctttatatttaaggagtgcctgtgctagaccgccatcttcatccccggattaaaccgttgttgcatcagtgcgtgcgggttcttgataaaccgggcattacgccagatggtttaacattagtgggatttgccatcggcgtgctggcactgccttttctggcgctgggctggtatctggcggcgcttgtcgtcattttgttgaacaggctgcttgatggtctggacggtgcgctggcgcggcgcagagggcttaccgacgcgggcggctttcttgatatttctctcgattttcttttttacgcgctggtaccttttgggtttatcctcgccgcaccgcagcaaaacgccctggcaggcggctggctgctgtttgcgtttatcggcacaggcagcagttttctcgcttttgctgcgctggcggcgaaacatcagattgataatcccggttatgcgcataaatcgttttattatctgggcgggttaaccgaaggcacagaaacgatcttactgtttgtgctgggatgtttattccctgcatggtttgcgtggtttgcgtggatcttcggtgcgttgtgctggatgacgacctttacgcgggtgtggagtgggtatctgacgctgaagtcgcaccagcgtcagtaattgcaatgttatttgctactgtccgggccgcgttcaccggttgctaccggattttttggatcgctgctccattcgtaccagccgccgtcatacacggaaacattcttccaacccatggcgcgtgcgtacataaaggtttcggacgcgcgccagccggtgccgcagtagaatgaaacttgctgctctggtttgatattccacgctttccacatagcggtaatatcatcggcgctgcgcatggtgccatccggattatgaaaatcttccatatgcgtcgagtcgctaccagcgtgtccccaacgtgctccggctatttcaccttttggtttaatatagctgtaaccgctggtcgtaccgataaattctggccacgaacgaatgctcaccagcgatgcatcctggcgatgcagcagtccacgggcctgttccatatcgagcatcaactgcggttgtgccgggatcttcacgccgaaatccggttccgctttcactttcggtggcgttcctcgctcaacaggcagtcccgcgtcggaccaggtttgccagccgccatccagcagacgcacatctttcacgcctgcgtagagcataatttgcgccacacgcgctccagcgtatacgtcacgcccgtacagaatgaccgtggtgtcatggcgaatgccgtgttttgccagcatcgcttttagttgttcatcagaaactttgttccacagcggttcgctttccacttcgttggtatcgatgtagtcagcaccgggaatatggctgataaggtaaagcttaggagcgccccaggccgcttcaatgactttccagtcaccggcaggtttcgccgtaacctctttaccttgttgcaggtcgtgcagccattgcggataaaccagctgctcaaagtgcggcagtttttgtagacgggaaggttcgcttagcgcgtcactcagaatggagatatgcgtaaaacctgctttttgcagtcgcgttttgacggcgtcgacatctttgtcattaccgtacagcgccaccggggcatcggctttcaggttatgttgcttgatccacgcgttgagctgttcggtgctcattttgtcgagccagctggcagagaggtttaaggcggcaggttcatgaccagaagggccatttaaggtttgtggccagccgttataaaacgcgctggggcgagtatctatcgctttgccattttgttgttgaagctggtcaagtgtaagaggcttcgccagttcagcggcccacgaagaagcgcaagccagccctaaagccattgccagcgcggtcatttgagaaacacgtttcatcgaaaatcccgacattgtagttttgagtgcgccattctgaactgacgcattgagaaaaactttgcgttatcgcagtttgttgtaattttctgaccactgcgccatatccagaacagaactatcagcaggaacatcctggagatcgtgcgttacctgaacgacggggatcgccagttcgcgaacttcgctgaacacccactggcgaaaattatcgcgcagagccacatcaagacggctgaatggctcatccaggagtaacgcttttggctgagcgagaagggcgcgcagcagggccacccgcgctcgctgaccgcctgataatgtcgcagggtcctggtgataagtttcagccagtcccgctcgatcaagcgcgtctttcacggcattgcgcctggcagtccccttgagcgtcgacggtagcgccagcagtaaattttgcccgacgctgaactggtcaaataacagtgcatcctggaaaagaatgccaatctgacgctgtgcggtgggtagcatgtcaatccgttgctcattgagccatagctcacctgtacaagaaaactgtccagccagtgcaccaatcatccatgaaaacagagtggattttccacagccagacggccccattaacgtgacaatgtcacctttatccaccgtaaagttaacgtttgtcagcaagcggctttctggtaaacgtagcgaaacatttttcacgcagggcattagcggagtccttgtctgacataacctacccattttgcgactaacgcggtcagggcaaaaataataagcggtaatagcagttgccataaagcctgggcggcgaaaataccattgctgccgccgctgcttaatgccaccgcctcagtggtgagcgtcggaaaacgccccgcgcccagccacagcgtcggcatatactgcgcaatactgactgaaaatcccaccgcgaaggcaatcagcgtagggcgtagcataagcggacatttcacgtaaaagaagattttggcccgcgaccagctcagtgtttgcgcaatcaaaattaaccgtgaatcaatgcgctgccaggcgggttgcaggataaacagcatccacggcattacccacagcagatgcccccagaccaccgccgtccagcttccatccaggttcagccatagcgccagcgtgtactggcccgccaccagtggcagagcgggcaatagaatgggcaaccagagccacaactggcgacgctgtggcccccattccagccacagcagtaacaggagcaaagcgatgaatgtcgccaccagccccattgtcaggctgttgatgagtgcttcactattgatcgtcgactgatccgcgaggatcgccagcagaaccacacacagcacaccggttaagggtaaaaaactcgccagcgtagtgcctggtaataaaggtgtggcaggcttgcgaatgccatctacgcggggaatagtgcgccgccagctgcgccatagcagatagctcagcaaaacgtaggcggcgagtaacagcatcagcagcagactggcgagtgcgcctttcgtttgttgatccgcgtcgccctgagttaaccactgccagctaattactgccagcgtcggtggattacctggcccaagaataatcgccacatccacgaccgaaagcgaccaggcaacaatcgccaacatcgccattgccagtgcaggtgcgacggagggcaagagcagccagttcaggcattgccagcggctgtagcccagcgaatccagcacaatgacctgctgcaacagccgtttttcgctcaatactgccgctaagatccacagcagaaatgcgctttctttcactgcaagggtgaggcccagcccaatacccaatttgtcctttagcggagtgaaatacgggaaatagtcataaagcagccctccgtcagcaaagagcagaagggcgctggtggcaaaagccacatggggaatggcgagcagccacggcagacgggcacacatacgctgccatttcggccaaggccacagcgccacaatcaccagcagggcaatcaacaacgccccgaccgccgcgatggttgtcgacaccagcgttgccagtaatgcctgcggtaactgtggatcggcaaataacgcctgccagtgtgtcaacgacaaagcaggcgatatcagcgtgagagctgccgggatcagtggtgcataaatcaccgccaccatcgcccacagcaaaaagattaatgcgtaccgtaacggtgtagccattcttgttccagcgcatttacccaacctgcgtgcggttcagccagtaccggcggcagatcttgcggcattcttgattgcaatgtttcgcgctgcccatcaggcagtttttgcggatcgagaacagaaggatcgccccagacagcgggatccgctttacgcagttgcgcattgggtgagagcaggaagttggcaaccaccttcgccgcagcactggcatttgcgttagcaggaatggtgacgaaatgcacgttgccaatcatcccctggttaaaaccaaaactgtaactgcttgcaggcaaatcgccgctggcgattttttgctgggcatgagcagggttaaaggtcagcgacaggcgcaatgtgccggctttcagcagagcatccatccgcgcgggcgaaggcgggaaatcctttcctttgcgccataaatagggatgtagcgcgtcaagatattgccacaagggcgcagtgacgcgggcgaaagtggctttatccggggcaacttttaacgcggcgggatcgggcgtcagcataatcagcaactgttcaagaaacgccgtgccggtaaagtccggtgggcgcggataggtaaccgtgccgggattggctttagcaaactccagtaaggcttgcggcgtttgtggtggctgtggcgtaacatcgcggcgggcgataaacgtcagttgtgcgccgccccagggcgattcagccccttctgtaggcactgaaaaatcttcccgcaccggcagctgtgtgtcgacatagcgccagttgggcagagtctccgcccagcccgtttgtaataaattggcctcttttaaggtgcggaagttttcgccgttcacccagagcagatccaccgagccgcccgttttacgtccggcagcagcttcggtctgaatgcgcttcaccgcgtctgcggcatccgccagacgaacaatcttcaggtttatagcgtaatgggttttcatctcgccgctaacccagtcgagatagcggttaattgcggtatcgccgccccaggcgttaaaccagacggtttgccctttggcctcatttttaatttcctgccagtcactggcatgtgttgccagagaaaacagcgataacaatcccagcaaccacccacaatggcgcatcttctctccttaagaacgtttttccggaatacggcacagcccctgagcgggaatgtccatggcagaattaaaacgagccgacaggttttgcaggccgatcaatgccgtcagttcggtgagcgcctgagcgtcaaaatgcgcagccagtcgggtgcgcagggcatcatcgaccgttggcggcgttacgcttgcggcttcggcgtactccagcgccagccgttcttcatcgctgaagagcgggctttgccgccagtcagccactgccagcagtttatcggtgctgccggtacgctcggcgactttcatactggtgatatccacgcaaaactcacacaggcacatttgcgcaatgcgcgcgctgacaagcgatcgcactaccggatcgagcggtgagcgtttgcgctccagccacccaacaaacattgacaccaaataaaagataaacgggatccgcccccaccagcgaatcgggcttagcacctcgccgtaatggcgacgatgcagccacgcctgcggacgtaaaatgaaaggaattttgctaagcggcggtaaacccatcaggcattcctcttctggcgctcaagccatattttcttcgccataaaaatcaccacggtcagggcaaacagaataaacagtccggtgacaaaccagaaagtaccgcctgttaacatgctgcccgcccaggaataaacaatagtcgccggtaattgaccaagcccggtggcgataaaaaacgagcgaaaacgtattgaagtcagaccggcagcatagctgattggatcgaaagggacaaaaggcaataaccgacagaccaggatggtgtgtttgccgtagcgagtgaaaaagccgtccatactgtcaagcacggttttgccggttaatttttccaccacttcgcggcccatcactctggcgataaaaaagcacagcgccgcgccggccatcgaactggtccacgacagcaagccgccccagaacgcgccaaacagcgacgcattggcaaaggtgatcaaaaacgcaggtagcggtgcagcaatggcctgtaaaatcatcaacaagaacgagacaactgccgccagtgcgccgtaagactgaataaagcgttctataccctgttggtccacggcggcaaacgccgcaacgctgcgattgataaactcatggacgccgggaagcagcgcccatgcgagcagcatagcgaacaacaggatgatgagggttatacggtagtaccagattttacgcgattgtatcttcatcatcctttatcctggctttattcggtgattttaaaggtaaccgttgccagcgtgttatccgccgggagaactgaggcattgcctttgaatttcacttcgccgcgtttttccaccgcaccataagtgtatgttgcattgctgacgatgcc

SEQ ID NO: 221 - DNA, 25165 bp, Escherichia coli
  source 1..25165: mol_type = genomic DNA
aattattatcagatacaaatattaacgatgtatgcccatcaatcagaggaccgaaggttaccccttcaatacaatccgcagaggaagtgtaatcagcaaaatcaattaataattttttactgacgggttgtaacgtggatttattggaccaatcttgcagactgtcaatattcttgatatcgctggcagcagttaaatcaaccatataaactctgacagagtaatcccagtcattgaacccagcactgacgtttctgccggaacgttcgatgaccaacaattggtgatcattcagcgccaggacctcggatacgccattatcattaataccgaacttactcacttgcggaacaggatcagtaatatagagatattcatgcaattgctttgaaggtcgaccgtctgcatctatagaaaattgcagtaagcgtgctgtgcctgaatttattggacttgcaataggcccatcctgtttaaggctgctttcaacggcgataaaaagtgattttccatctggtgtaactgtcaggccctcccaggcgttgccgctgcgaataccattgctgctctctttgtcagaactaatattaaagcgagcaggaaataaagacgtaaaatctttctccattacgccatcgagagtgctcagacgcagtggagcacctaactccgaactccagagtaatgatttaccattgtgtgtcagggccagaccttcggcatccaccgtattggtcacgaaaggctgctgttttgcatcaagcagtggacgctggttgagaaaattcacttgctcaatgcccctggatgatacctgtatttttagtgtataaagactggcatctccttctttattattgtttctgctatcgttaatagcatagaaaatatttttttttgcatcaaatgtgatggctgatagccccgcgattgtgacattgttctgcttttctcccgtccggaagttaaactccccagcataatgaagaaaactgtttgcctgcgctgttgtgcataacagcggtaatgccagaaaaatagcggcatatcttattttcatgatatttacctttgtatatatatgattttagtcgtgttgtgaaagaaaaagattaacctccgatggtgtcggcagatgacctctggcacctaaggcagtaatatttattgctgctgtggcagaagcaaattttagtgcttcaattaagggcatgttttttattaagctataaacaaatgcaccattaaaagtatctccagcgcctgtggtatcaataacgggaattgtataactacctatttttacttgctcattgcctttgactgcaattactcccctaacatccagcgtaaccacgacagcgtcaagttgatactcgtcttgtatatcatgcagaagtgtaaaatctggctctgttgcatagccacgaataaaaccgtcataattaaatatcgcaatatcagcaaggtgtaaaattctggcaaggtgttcaggtgttgcaatgatatgaggctcaatatcaacgacaacttttgtcatttggctacgggaatattcggccagcatacgaaatttctcgatatctgctggcatcgtataaaaataacggctttgcgcaattgcctgcagggctttttctttatcccactcatgatcactaccaggcgagtaaaccaactttttttcacctaattcatcaataaagataatcgcggtattggcaatcaattccggaattacctgaacgaaatcacaatttacatgatattttttaaatccatcaagaatgatcgaggctgaatgatcattgcccacacatgaaacagataccatattgagacccagttgtcccatcgcacaggcactgttggcgactgtgccgccagcttgttcacccagacgtgtcccgacaactttaccgccacgagtggggagtgacgggatagataaaaaaatatctatatttccactgcctaaagcggcgacatcaaatttcttcatagtcttatttctccctatggctaacgcgttgcccgcctgcgtcgacataatcacaacttaaatgccagcacatttcatataaccactgcatgaccagaaataaattgttggactcactggcgtcaggtataaaactgattaattctgctgtcgctccctgttcaacaattgctttttgggttgcaaggtaaaatggggactcgcaggatgtggctggtagtaaaatataatgctgcccgacaccagcctgatgtaagcgtaatgaatgataaaattcttccagtggaagggctgtcgcacgaatctgtgggccgcaagaaagtaaattgctccccgatattgccagtccccaacttaagccactcccaagaaacgttatctctttttgttggtaaaaatggcgcttcttttgctgccagtgctgattaatctggctaaatttcccttccaaatcctcttcaatctgcagtggtgttaagcctggacataatttttgcgctaagcgcaggagggcataaagtgtgacgctactactttgcgttggaataccctgcttattcgcccatgtatagagcatgttttctgttattgcgcaaaatggtgttccagggcaattcgtcacacccagcacttgcgcgtttgagcatactgcgtggcagagggcgtcaacagtcattgatggtctgccacttgcactgagaataatgattaacgtttctttctgataacgggttaaatcagtctgaagaaaatcccacgtttgcaatgcgtaacaaaacagatgtgtgtatttccccagccaggcggcggcacatagtgccaccgtccaggagtcgcccgatcccactatacagacgcgttcaacagcacgtttatcgagctgaaaagtagaaaaacattcaccccagatagctgccaaatggcgtaacgatgccgccgtagcatttatttcctcacgagtttgcgctaatggcataacaggagtacgggctggcatgttcattatttctcctgtgcctgtaatgcaagcaatgtcagacccgatgcgatcgcttcaatatcgaaatctttattatttacggcgcggaaaaaggcatatttatcttcagggagcgcatcaaaaccgcgccatgcccctgcaattgcgcctgccatcgtagcgatgctatcggtgtcattgccaatattggcgcaggcatgaatggtttcccagggttctcctttgcagtacagcaatagaccgattgccgcaggaatggattcatgggcggcaacagagttaccaaccaaaccttccatttctcgcagacaagactccaggtcattggctcgtctggcgatgtccgctgcaagttggatgcgcatggcgatagatggccctgcgacacatcgtgcatattgtttggccaggcgttcgccgtaattcgctccccagattgcggcgtccagtaatgatgtgagcgaggcttctggtaacatagcttgtgatgtcgccgcagcgatggcgcaagcgctggcaatcgcaatattggtgtcatgcgaaggtaggcaagttattagcgccaggtgacacgctttttctttcttgcctggccagatcaatcctgccggggctacacgcattcctgcgccgttcgtggtgccgacattgggtgcctgacgagaagatgttccaatacgcccaatggtgtttgttggtctaccttcttttagtgccttgacgatttgttctgttgtggggcctttataatttgcgtagggctgcatatcggcccaacgcagaagacaagctaaccagtcattattggtgaagttatcaaatccagcctcaactaacccttctgaaaatacatacatttggctggaatcgtcggtaataagtcccgcaataccatttaatgagccagcaaaggtatcggcaggaggagaaacaaaggcatttaaaaaacctccccattgcgcttttatttcatcaatgctgtagagttcagtcgctgcgcctaatgcatcgcccatacccgcgcaggctaaagaacctaatattttgttataaattacggcttgttctattttgttcacaatattctctctgttacacgctaaaactgtcttttgtaattcgtgctttgtaggagtaccgacttgcgggataaaccatctctacatactccattggtttgcgttccacggataacgtgacgcgggtacaacttaatacgacgtcatcggcagtcagttccagtaattgacgctcaagaggcgagggaagtcgggcagagataatttccgttgcttctaaaggtttaatagcgagtttttcttccagtaaaatatagagggaacccgtcgccagcagctcttcctgagttatttcttgtccgtcatttaacgcaagccatgatgtctgaatacccagcggcgtacttcccatatagcgaatgcgttttatacagaaaacggtatggacatggatatcaagttcgagattttttctgataatatcacttagaggaatataacctatttcaagaatattctgtgcaggtacgccgccacgagccttaatgtcatcagtaaaactatgtaataaatgattttcccgactgcgagccggtaatgtaaatgttccttgcccgtggacactatgcaggtatccgcgttgtttcaaactttctattgctttccgaattgttgttctgctgcttaaaaaatgttcagcaagttctctttctgttggtatagctttgccttctttccattcaccgttatcaatctttttctttatttcatcaaaaatttcacgatgcttaagctgacctttactggctttataaattcttatcatgacaaagcctcatttcaagtggttgataccaactctacattcttttatttttattgcgcagtatgcttctttgttatctgtgatataaaacagaaaaaaccacatttattattaaaaatcattaagttaaatgagattggtttttatgtgatgctgctcaatattaactcagtggtttgttgtggtatctaccaatgcatttattctcactcgtaaagttatgtgctgaatgagttccgatacatttgtttttaatataatttcacgtgatcaatgagtgctgtgtatgaaactgacaataaatgaaaagataggttttggtgccggtgatatggctattgcgatagtaatgatgtctttagccatgatcatcacttatttttacacggatgtatttggtctgaaacccgtcgacttaggtattctgttattttctgtacgtatccttgatgctgtgattgatccagttgtgggaacaatgacagacagaacgaatacacgttggggaaaatatcggccgtggttgctttttatgtcaataccgtttgggataagcatttggttgatgttcaccacacctgataccgattattcagttaagcttttatgggcctgggctacctatgtgttacttaccttgacctatacgttaatcgctattccttatgtttcattaatcagcgttatcacggatgatccacaagagcgattgagcgccaatggttatcgttttgttatgacaaaaattgccatgttcgccgtaacaattattgttcctttatctgcaatgtatcttgggaagaataacgtaaaactgggttatcaaatagcaatgggggcaatgggaattctggcaacgtgtttatgtctgtattgtttttttagcgtgagagagcgcatctaccatccaaaacccagtctcggtatggccgcgcagtttcggttactgatcaaaaatgatcaatgactcattttgggcgctgtaattgcgatcattatgtttggcgggattattcgtaactctgtcgctgcatattatgcaaaatattacctgaatggtggggatgctttaatttcaccgtttttaacttcaggcgtgatcgcctctgttctggctatgatcgcttgtacctggcttactcgactctacgacaaaataaaaatatttcgttatacccaattactggcgttcgtggtgggtggtgcgatgtatttcgtgcaaccaaattctatagtgttagcttttacattttatattgtggtgaccttcctgacggatattcagcttcccatttattgggcatccattgctgagtccgtggattacggtgaaatgaaaacggggcaacgtgtttctggcctggcatttggcgggattctctttttccaaaagttcggtatggggctggcagggggctttatcggaatcgctttagcctatttggattatcaacctggtgtagaacaaacaccacaggcgctgtgggggatctgcctgttaatgacgatctttcccgcgatacttaacctgattaccggactcatcatgcgattttatctgattaataatgaattttacgaacagattaaagcacggttacagacggcggaagagtgaatataaatggccggcaaacagcaccggcctcttttcaggaatgttaaatccctggctgcagaatacgaatattcatctccagcacgtcaccttttacggcttcgctatacgccttcatgtgcggggtttgcagatgcgcttcaagatgcgcgatgctttcccactgctctatcatcacgatagaatccggtgccatagactggaaactcacgccagcagcgcaatccaccattggcgcatagccgtggcaaccttcttctttcagtacggttggaacgattttagcaaactgatccaataccgcctgacggtgatgttgaccaggacgagtacggatttctgcgattacggtaagcatggttaactccttctaaagcctgagctctagttaaccaaaaatttccacaagatgcttgcgatattcttcagtatagcggggaacatcaggcatttttatcacgtcattagcgataaatgtcggcagcggttccataccgaggaattggtttgctttatggaacggcagatacacgccgtcaacgccaacgccgtggaagaactgatctttttcggtgaaggcttccattggtgcgttccaggtcagagaaagcatatattttttgccctgtaccaggccgccggagccgtattttttcgacggatctttgcgggtacgaccatcgctggcatacagagtcccgtgaccttcggtgaatacatcatcaatgtattttttcactgtccacggcgcgcccatccaccagcctggcatctgccagatcaccacatcagcccagagaaagttttgtacttccgctttgacatcgtagtcgctgtcggcgcgaacgatgcggacatcatgcccgaggtcgcgcagtgtgccatccgcgacttcggtcagggtgtcgttcagttgaccattggagtgggcgaattttttcgcgccgttgataatcaggatgttgctcattttttaacctcaaggtgagacgtttgtcgactatagtacgtcacagagcggtacggtgaaattagcaaaatgtgcaaagtcttttgcgaatttagcaaaagtcttacccttaccagcttaccttcgcctcaaatccaccttgttccgcattcccaaactcaacattcatgccatgcagcttggcgattcgctggacaatcgatagcccaagtccactgccggtggcggtttgtccgggtgggcgatagaagcgttcgccaattcgcgccagtgcctctggtgtcacaccggggccgttatccctcacgatgaaattatcggcattcagcgtgacgtccaccacgctgccctgtggactgtaacgcacggcgttatccagcaaatttcgcaccaacaaacttagcaatagcggttgtccggtgcgtttgatgccctggacattgagtgtcagtcgcacgtcaattttcgcctgctgcgccgtgtggtaaatatccatcaccgacgattgcaggagatcttcaagcgggatctccgcgacgtcctgaaggttatccagtgagtccagccgcgatagcgtgagcagttgatcaaccagacgagtagcgcgatcgatcccggaatgtaattgaagcagtgcttttttccgcgcctgcggatcatcgtcagagagctgcgcaacttcggtttgcactttcagcgccgttaacgggctacgaagttcgtgagctgcgtcggaggtaaagcgtcgttcacgaaccatcatcgcatgtgtgcgggcgaacagttgatttagcgactcaaccagtggccgcacttcgctgggtacgccagtcgcgtttagtggtttttccgagtcagggtcacgcatacgtagtgccagcgccagtttgttcagcggcgcgagttcacgacccagtagtaccatcatgatgattaacataatcggcagtgcgaccagccacgggatcaattgcccggcaacaatcgccagcgccatgtcttcacggtattcccattcctggccaacaacgatgcgatatttgccatcaggtgaggtcatccagacaaaacgccaaggatcgtcttcaccgaccagttgcccgtcagcaaaaccttcccgttgatagctatagggaatatcttctccgttatcgccatcattaaggaccattctgccgtcgtgggtaaagatggcaaaggtcagcgcatcgtcatcaacatgaccgtgttttaatctatttggcgtttgtgccatgcgatccgccgcgttgatttcgttgagatcgagcgtacttaaccgcttggcaaacagcatcagttgggtgtcgaacaattcatcgacgttatccgttgtttgtttccaggcgacaaagctggaaagcagccaggtcaccgaggccagaattaaaaagattagcgtcagcctgacgcgcagactaagacgttgggtaaatttcatttctcacctaatgtgtagccaataccatgcacggtacgaataaaatcactaccgagtttgcgtcgcagatgatgcacatgcacttcaacggcattactggtgacctcttcgtcccaggtatacagtttctcttcaatcagtttgcgcggcagtacccgaccagcgttacgcatcagtaattccagcagggcaaattcttttggtttcagtgttaagggttcgccagccagcgtggcgatacgtttgtcggggtcgagcatgacgttaccgtggcgcagctcgttgctggcctggccgttggttcggcgcatcagagcttccagcctggcggcgacttctatcaacgcaaaaggtttacacagataatcgtcagctcccagacgcagcccttctacacgttccgccagcgcatcgcgcgcggtcaggatcagtaccggctcacgctgacctttttctcgccattcgcgcaaaatatcgcgaccatccatgcctggtaaggttaaatccaggatcaccgcatcataaggtgcgctataaagcgcctcttttccctgacgaccttgtgtaaaccagtcgacgctaaaacccattttactaaggcccgttttgatgccgtcgccaatcagcatgtcatcttctatcagtaaaattcgcattttttcatccctgcgataaccgtatttgctgccagtaaaccgtgttgtaacgcgctctgtacagcactaaattttatttttttcccttaagaagttgttaaggactatcttgttaaatgctcggaaacagacattaaagggagtaataaacatgaaaaaattcgcagcagtaatcgcagtaatggccctgtgcagcgcaccggtgatggcagcagagcagggcggtttttctggcccatcggcaacgcaaagtcaggccggaggattccaggggccgaacggcagcgtaacgactgtagaaagcgcaaaatccctgcgtgacgacacctgggtaaccctgcgcggcaatatcgttgaacgcatctctgacgatctctacgtgttcaaagatgccagcggtactatcaatgttgatatcgatcacaaacgctggaacggcgtgacggtgacgccgaaagatacggttgagattcagggtgaagtcgataaagactggaattctgttgaaattgacgtcaaacagatccgcaaagtaaatccgtaattgttactgctcccgggacgcgttcccgggaataatttcgcagggaggcaaaatgacaaacctgacactggatgtaaacattatcgatttcccatcaatccctgtggcgatgttgccgcaccgctgtagccctgagttgctcaactacagtgtggcgaaatttatcatgtggcgtaaagagacggggctttctcctgttaaccaaagccagacttttggcgtcgcctgggacgaccctgccaccaccgcaccggaagcgtttcgctttgatatctgcggcagcgttagcgaaccgattcccgataatcgttatggtgtgagcaatggtgaacttaccggtggacgttatgccgtggcccgccacgttggcgagctggacgatatttcacacacgatatggggcattattcgccactggctgcctgcaagcggcgagaaaatgcgtaaagcaccgattctgtttcactacaccaatcttgccgaaggggtgacagagcagcgactggaaacggatgtttatgtgccgttagcgtgatgcctgactccagcttcccttataaattcctgcttcaaactggcgctactaatgcgccactttcttatatggtcaatcactttccttaaagaatacgttttgtgtggtcactatatccgtacatctaactaaccttttaggtggtttttcattgctgtaattaaccttttaggttataactaaagtaacagggaggcgggggttatggaaaaacgcacaccacatacacgtttgagtcaggttaaaaaacttgtcaatgccgggcaagttcgtacaacacgtagtgcactgttaaatgcagatgagttaggtttggattttgatggtatgtgtaatgttatcattggattatcagagagcgacttttataaaagcatgaccacctactctgatcatactatctggcaggatgtttacagacccaggcttgttacaggccaggtttatcttaaaattacggtaattcatgacgtactgatcgtctcgtttaaggagaagtaatatgaaatgtccggtttgccaccagggagaaatggtttctggcattaaagatattccatacaccttccgtggacgaaaaacagtattgaaaggtatccacggtttatattgtgtccattgcgaagagagcatcatgaataaagaagagtcagatgctttcatggcgcaagtaaaggcatttcgggcttcggtgaatgccgaaacagtggcacctgaatttatagtgaaggttcgaaaaaagctctctcttacccaaaaagaggcaagcgaaatttttgggggaggtgtaaatgcgttttcgcgttacgaaaaaggcaatgcccaacctcatccttccacaatcaaacttttacgtgttctggataagcatccagaactattgaatgaaatccgttaattaatggaaaagcgggggcaactcgcttttttctttaccggagtgtgagccaaatcactcgcgataagtttgagcgaacaatgccacaggcgtattgttgttgggcttataatttctccggtaaggaataccatgtatacgcgaaatttattatggctggtcagcctggtaagtgcggctcctctctacgctgctgacgttcccgccaacacaccgctcgccccgcaacaagtctttcgttacaacaatcatagcgacccaggtacgctcgacccgcaaaaggtggaggagaatactgccgcgcagattgtgctggatctgtttgaaggtctggtatggatggacggtgaaggccaggtnnnnnnnnnnctgaacgctgggagatactggacggcggcaagcgctatattttccatctgcgtagcggtttgcagtggtccgacggtcagcctctgacggcagaggattttgtcctcggctggcagcgcgcggttgacccgaaaacggcaagcccttttgctggctatctggcacaggcgcacattaacaatgccgcagctattgttgcgggtaaagcagatgttacatcgctgggtgtcaaagcgacggatgatcgtactcttgaagttacgcttgagcagccggttccttggttcacgacgatgctcgcctggccgacgctgttcccggttcctcatcatgtcatcgctaaacatggcgatagctggagtaagccagagaacatggtttacaacggtgcctttgtgcttgatcagtgggtagttaacgaaaagattactgcacgcaaaaatccaaagtaccgcgatgcgcaacatacagtattgcaacaggttgagtatctggcgctagataattcggtcaccggctataaccgctatcgcgcgggagaggtcgatctcacctgggttccggcgcagcaaattcccgccattgaaaaatcactgcctggcgagctacgaattattccgcgtctgaacagcgaatattacaacttcaaccttgagaaaccgccatttaacgatgtgcgagtgcgtcgggcgctatatcttacggttgatcgacagcttattgcgcaaaaggtactggggttgagaacgcccgcaaccacgctgacgccgccagaggtaaaaggctttagcgcgacgacgttcgatgaactgcaaaagccaatgagtgagcgcgtcgcgatggcaaaagccttgctgaaacaggcgggatacgacgcctctcatccgctacgctttgagctgttctacaacaagtacgatctgcatgaaaagaccgcgatagcgttgtcttccgaatggaaaaaatggctgggtgcacaggtgacgctgcgcacaatggagtggaaaacctatcttgatgcccgacgagccggtgatttcatgctgtctcggcagtcgtgggatgcgacgtacaatgatgcttccagcttcctgaacacgctcaaaagcgatagtgaagaaaacgtcggtcactggaaaaatgcgcagtatgacgccttactaaaccaggccacgcagatcactgatgcgacaaagcgtaatgcgttatatcagcaggcagaagtgatcatcaaccaacagacaccgctgattcctatctactatcagccgttaatcaaactgcttaaaccctacgttggcggttttccgctgcataatccccaggattatgtctacagcaaagagttgtatatcaaggcacattgatgcctttatcgccgtcggagcacgtccggcggcgctattcacgctgatctcctgtgactcgacgcggcagataatgtagtatctccggcaatattgcccctttgaaggctggcgaataagttgaggaatcagaattaatgagcgatatggcagagcgccttgcgctacatgaatttacggaaaacgcctacttaaactactccatgtacgtgatcatggaccgtgcgttgccgtttattggtgatggtctgaaacctgttcagcgccgcattgtgtatgcgatgtctgaactgggcctgaatgccagcgccaaatttaaaaaatcggcccgtaccgtcggtgacgtactgggtaaataccatccgcacggcgatagcgcctgttatgaagcgatggtcctgatggcgcagccgttctcttaccgttatccgctggttgatggtcaggggaactggggcgcgccggacgatccgaaatcgttcgcggcaatgcgttacaccgaatcccggttgtcgaaatattccgagctgctattgagcgagctggggcaggggacggctgactgggtaccaaacttcgacggcactttgcaggagccgaaaatgctacctgcccgtctgccaaacattttgcttaacggcaccaccggtattgccgtcggcatggcgaccgatattccaccgcataacctgcgtgaagtggctcaggcggcaatcgcattaatcgaccagccgaaaaccacgctcgatcagctgctggatatcgtgcaggggccggattatccgactgaagcggaaattatcacttcgcgcgccgagatccgtaaaatctacgagaacggacgtggttcagtgcgtatgcgcgcggtgtggaagaaagaagatggcgcggtggttatcagcgcattgccgcatcaggtttcaggtgcgcgcgtactggagcaaattgctgcgcaaatgcgcaacaaaaagctgccgatggttgacgatctgcgcgatgaatctgaccacgagaacccgacccgcctggtgattgtgccgcgttccaaccgcgtggatatggatcaggtgatgaaccacctcttcgctaccaccgatctggaaaagagctatcgtattaaccttaatatgatcggtctggatggtcgtccggcggtgaaaaacctgctggaaatcctctccgaatggctggtgttccgccgcgataccgtgcgccgccgactgaactatcgtctggagaaagtcctcaagcgcctgcatatcctcgaaggtttgctggtggcgtttctcaatatcgacgaagtgattgagatcattcgtaatgaagatgaaccgaaaccggcgctgatgtcgcggtttggccttacggaaacccaggcggaagcgatcctcgaactgaaactgcgtcatcttgccaaactggaagagatgaagattcgcggtgagcagagtgaactggaaaaagagcgcgaccagttgcagggcattttggcttccgagcgtaaaatgaataacctgctgaagaaagaactgcaggcagacgcgcaagcctacggtgacgatcgtcgttcgccgttgcaggaacgcgaagaagcgaaagcgatgagcgagcacgacatgctgccgtctgaacctgtcaccattgtgctgtcgcagatgggctgggtacgcagcgctaaaggccatgatatcgacgcgccgggcctgaattataaagcgggtgatagcttcaaagcggcggtgaaaggtaagagcaaccaaccggtagtgtttgttgattccaccggtcgtagctatgccattgacccgattacgctgccgtcggcgcgtggtcagggcgagccgctcaccggcaaattaacgttgccgcctggggcgaccgttgaccatatgctgatggaaagcgacgatcagaaactgctgatggcttccgatgcgggttacggtttcgtctgcacctttaacgatctggtggcgcgtaaccgtgcaggtaaggctttgatcaccttaccggaaaatgcccatgttatgccgccggtggtgattgaagatgcttccgatatgctgctggcaatcactcaggcaggccgtatgttgatgttcccggtaagcgatctgccgcagctgtcgaagggcaaaggcaacaagattatcaacattccatcggcagaagccgcgcgtggagaagatggtctggcgcaattgtacgttctgccgccgcaaagcacgctgaccattcatgttgggaaacgcaaaattaaactgcgtccggaagagctacagaaagtcactggcgaacgtggacgccgcggtacgttgatgcgcggtttgcagcgtatcgatcgtgttgagatcgactctcctcgccgtgccagcagcggtgatagcgaagagtaatatgccggggagggcgctgtttcctcccgcttgcaaggaacgccggatgaaacgttaagtcgtcatccggcagcgtattcaacccccggaaacgataaaaattcccttgaaaccgttgtttattcatgcgttgcgattaacaatacgcttttccagagagcggcttttaacaatgccctaacctgatttcaggtgacgtacaatgccagtctctcagaccttcagagggtgttatgctatatatctttcgtcttattattaccgtgatttacagcatcttagtctgtgtattcggctccatttactgccttttcagcccgcgtaacccgaaacatgtggccacctttgggcatatgtttggccgtcttgcgccgctgttcggcctgaaagttgagtgccgcaaacctgcagatgctgaaagctacggcaatgctatctatatcgctaaccaccagaacaactatgacatggtgacagcatcgaacattgtgcaaccgccgacggtgacggtaggtaaaaagagcttgctgtggatccccttcttcgggcagttgtactggttaaccggcaacttattgatcgacagaaacaatcgcactaaagctcacggcaccattgcggaagtcgtgaatcatttcaaaaaacgccgtatttccatctggatgttcccggaaggaacccgcagccgtggtcgcggcctgctaccgttcaagactggagcatttcacgcggcaattgcggcgggcgtcccgattattcccgtgtgcgtctctacaacttcgaataagattaatcttaatcgactgcacaacggtctggtgattgtcgaaatgctgccgccaattgacgtcagtcagtatggcaaagatcaggttcgtgagctggctgcccattgtcgttcgataatggaacaaaaaatcgccgagctcgataaagaagtcgcagaacgcgaagccgccggaaaagtttaagtcggcaatctgtatttttgcggggaacactttcctgcacggtattactttagccagttttacatggagcaaatatgtcactcagtcggcgtcagttcattcaggcatcggggattgcactttgtgcaggcgctgttcccctgaaggccagcgcagccgggcaacagcaaccgctacccgttccgccgctgcttgaatctcgccgtgggcaaccgctgtttatgactgtacaacgtgcgcactggtcatttacgccagggacacgcgcgtcggtctggggaatcaatggtcgttacctggggccgactatccgcgtctggaagggcgacgatgttaagcttatttacagcaaccgcctgacagaaaatgtctcaatgacggtagccgggctacaggtaccaggcccgctgatgggcggtccggcacggatgatgtcgccaaacgctgactgggcacccgtactgcctattcgccagaacgcagctactctgtggtatcacgccaatactcccaaccgcacggctcagcaggtctataacggccttgccggaatgtggctggtggaagatgaagtcagcaagtcgctgcctatccccaaccattatggtgtggatgattttccggtcattattcaggataaacggctggataactttggtacgccagaatacaacgaaccgggaagcggcggctttgttggtgatacgctgctggttaacggtgtacaaagcccgtacgttgaagtctcgcgtggctgggtgcgcttgcgcctgctgaacgcgtcgaactctcgtcgttatcaactacagatgagcgatggtcgcccgttacatgtgatttctggcgatcagggattcctgcctgctcctgtatcggtgaagcaactttcgctggcaccgggcgagcgccgcgagattctggtggatatgagcaacggcgatgaagtgtcgatcacctgtggcgaagcggcgagcattgttgatcgtattcgtggcttctttgagccatccagcattctggtttctaccctggtgctaacgctgcgcccaaccggccttctgccgctggtcacagacagtcttccgatgcgcttgctgccaactgaaatcatggccggttcgccgattcgcagtcgcgatatcagtctgggtgatgacccgggtattaatggacaactgtgggacgtcaaccgtattgatgtcaccgcgcagcaaggaacgtgggaacgctggacggtacgcgcggacgagccgcaagcgttccatattgaaggcgtaatgttccagatccgtaacgtgaatggcgcgatgccgttcccggaagacagaggctggaaagataccgtttgggttgacggacaagtggagctgcttgtttatttcggtcagccttcctgggcgcacttcccgttctacttcaacagtcagacgctggaaatggcggaccgtggctcgatagggcaacttttggtcaatccggtaccgtaatcttcatactcgcccgaggagggcgagtatggaatacctttcgatttctctttcgttccggcttataatccccggcctttgattatttttttatcatttctggaagcaaaatgagctctatctccctgatccaaccggatcgcgacctgttctcctggccgcagtactgggccgcctgttttggaccggcaccgtttttgccgatgtctcgtgaagagatggatcaacttggctgggatagctgcgacatcattttggttactggcgacgcgtatgtcgatcacccaagcttcgggatggcgatttgcggtcgtatgctggaagcacagggctttcgcgtcgggatcatcgcccagccagactggagcagcaaagacgatttcatgcgtctgggtaaaccgaatctgtttttcggtgttactgctggcaacatggattcgatgatcaaccgttataccgccgatcgccgtttacgtcatgacgatgcctacacgccggataacgtcgcgggtaagcgcccggatcgcgccacactggtttatacccagcgttgtaaagaggcgtggaaagatgtaccggtgatcctcggcggtattgaggctagtctgcgccgtaccgcacattatgattactggtccgataccgtgcgccgttccgtgctggtggattcgaaagccgacatgctgatgtttggtaacggtgagcgtccgctggtggaggtggcgcaccgtctggcgatgggcgagccgattagtgaaatccgcgatgtgcgtaataccgcgattatcgtgaaagaggcgctgcctggctggagcggcgtggattccacccgtcttgatacccctggaaaaatcgacccaatcccgcatccgtatggtgaagatttgccgtgcgcggataacaaaccggtggcaccgaaaaagcaggaagccaaagccgtaaccgtgcagccaccgcgcccgaaaccgtgggaaaaaacctacgtgttgctgccttctttcgagaaagtgaagggcgataaagtgctgtacgcccatgcttcgcgcattctgcaccacgaaaccaacccaggctgcgcccgcgcattgatgcaaaaacacggtgaccgctatgtgtggatcaacccgcctgctatcccgctttctaccgaagagatggacagcgtttttgcgctgccgtacaagcgcgtgccacatccggcctatggcaatgcccgtattccggcttacgaaatgatccgtttttcggtcaacattatgcgcggctgctttggcggctgttctttctgttctattaccgagcacgaagggcgcattattcagagccgttcggaagattcgatcattaatgagatcgaagcgatccgcgacaccgttccaggttttacgggcgtgatttccgatgtcggtgggccaactgccaacatgtatatgttgcgctgcaaatcgccacgcgctgaacaaacttgtcgccgtttgtcgtgcgtttatccggatatttgtccgcacatggacactaaccacgaaccgacgatcaacctctatcgccgtgcgcgtgatctgaaaggcattaaaaaaatcctcatcgcctcaggcgtacgttatgacatcgccgtggaagatccgcgctatatcaaagagttggcgacccatcacgtcggcggttatctgaagattgccccggaacataccgaagaagggccgttatcgaagatgatgaagccgggcatgggcagctatgaccgctttaaagagctgttcgatacttactcaaaacaggcaggtaaagagcagtatctgatcccctatttcatctccgcgcaccccggtacgcgtgatgaagatatggtgaatctggcgctgtggctgaaaaagcatcgtttccgtctcgaccaggtacagaacttctacccatcgccgctggcgaactcaaccaccatgtattacaccgggaaaaacccgctggcgaagattggttataagagtgaagacgtcttcgtaccgaagggcgacaagcagcgtcgtttgcataaagcgttgttgcgttaccacgatccggcaaactggccgttaatccgccaggcgctggaagcgatgggcaaaaagcatctgattggcagccgtcgcgattgcttagtgcctgcgccaaccattgaagagatgcgtgaagctcgtcgccagaaccgcaatacccgtccggcgttgacgaaacatacgccgatggcgacccagcgtcagacgcctgctacggcaaaaaaagcgtcgtctacgcaatctcgtccggtgaatgctggtgcgaagaaacgccctaaagcggcggttggacgttaaaaaaaatccccggcaactgacatgctgccggggatttttttatcattctgcgtacatacgcaagcagcgcaggcaatcaaaatagtcctgagcatcaagacgcgtattggctctgttagcttcggatttggcagcatagatttgtgggcgtagtgctttcatatcctgctcaagccgggcgattttggcatttaatgtttgcacattgctcgccagctgattgaccttttgctcattgacgcagccactgagcaagcaggttgccagaacaacagctcccacggtgaaaatcgttttcatatagtgttcccttttatttattgttccggctaattgttatttaattcagctcattgctttaatctggcggcggtttttgcctcaatctgcttaagtaggctgccgctgttcgggcggataaaatcagcgatttcccacttgccttcgcgccgctgtaaaaccagttcttgctcttcgttgttgccattggtcagcgtaaaacgaacatgaatgcgggcggaatcggcggttttctccaggactcgaatttcatcaacgcgtgaaaatagcgactcttcgccaaaacagatcggattgtcgtaaataaattgccgttctatttgcatatcttcatcgggattattggccgtcttgaaggtggttttatagaaggcattaaccgcctggcggtaagagtcggaaaccacccacgtccacggccagctataatcagcaatatgttcaaagagttcggcaacaaaggcttccggctgttctttttgcaacgaagctaaagcggccagcgttttttcattctcgctattaactgcttgtaagacgctgccatgattgctgacaatatcgtcaatgacccaacgaccattttccgccaccattttcagtgtctgcgtggtcttttctttatcatctttaaagatacgaaagcgcacaacggcatcggcatgatcggcgtcagtttgggttatcgcaacgctttctagcaccagatcgccaaaatcctgacaatcacaaaccggatcataatccagccagccaatattgcccggtagcgaaagattgtcgttcagggtaagcgcctgttgaatacgcgcagaagttatcgcccgctctccggtttcaccaaaataaggggcagtggcatctgatttatagttctgataaatatgccggactgtttgttctacggtcagtgaggggggctgtgcgtgtacggtaaaacttgccagggctgctaaaaacagaagtattattttcatctgtttttcacctctccgttgcgtttatcccggatatagatgagttgttcttttaagagcttccggctctgcatgatgatgtccttatatttggcattcctgaacaaggaagagtaacaacgggcgggacgcgaggggaataaatgatttctgaaaagtccggtagcggaacattaccgccaccgggagaatttgcatgttagccgccgaactggtcaggatcgggaccgagacgcttgccctgatcgagttttgcaatttcgccgagttcgtctttgtcgagacggaaatcccagacatcaaagttttcggcaatacgtgaaggtgtgaccgatttcgggatcaccaccaggccgctatccagatgccagcggataacaatctgcgccggggttttgccgtatttatctgccagatcgcgaatgactttctgatcgaaaacgcctttccctccttgcgctaatgggctccaggattcggtctggattttgtgtgtcgcgttccaggcgtgtagctggcgttgttgcatcagcggatgaagttcgatctggtttatcacaggcgtcacgccagtttcatcaatcaggcgttgcaggtgatggatctggaagttgcacacgccgatgcttttgattaatccctctttttgcaattcgatcatgcctttccatgcttcgacataatggtcgatagcgggaacgggccagtgcattaagtagaggtcgatataatcaagctggagttttttcaggctgtcgagcagggcttcgcgggggcgcttgtggtcgtcgttccacagcttagtggtgatgaacagttcttctctgttgactgaggcatttttcagggctttgccgacaccttcttcgttcttgtaggccgcggcggtatcaatcgagcgataacccacttctaacgctttttgaatggcggtgattacttcctcattacttgcttgccagacgcccagtcccagctggggcatgacattgccatcctgtagcttaataacggttggattagccatacgttcctcctttatatgaactcaccggagcaggctccggtgaggtgttgtgaacttaagtctggacgaaatgcccgaaaacgaaagtttgaggcgtaaaaagcttagcgggcggcttcgtatatacggcggctgacatccaacgtaatgtcatgattttcgcccagttgggtcatgccgtgctcttccagttttttcagcaaagccgggatggagctgccgtccagaccgtagtcggagaggtgggtcggcacgcctaattgctcaaagaaattgcgggttgcggcaatcgcggcgtcaatacgctcatcatcggaaccttcagtgatgttccagacgcgttcagcatattgcagcagcttagcgcgcttggtctcgcgtttttcattccacagtgcaggcaggacgatagccagtgtttgcgcgtgatccagaccgtgcatcgcagtcagttcgtggcccagcatatgcgttgcccagtcctgcggtacgccagcgccaatcaaaccgttcagcgcctgcgtcgccccccacatgacgttggcgcgcacatcgtagttttctggctctttcagggctttcggaccatcttcgatcagcgtcagcaaaatgccttctgcgaaacggtcctgaattttggcatcaaccggtttggtaacatactgttccacggtgtgtacaaaggcgtccactacgccgttagccacctgacgcggcggcagggtgtaggtataaaccggatcgagcacggcaaataccggctgaacatgggcagaatggaacgcctgcttgtcgcctgtggttttacgggagatcaccgcgcctgcgttggattctgaaccggttgctggcagcgtcagcacacagcccatcgggatggcgcttttaatctctttaccgcccgtttgcagaatgtgccacggatcgatattttccggatagttagccgctgcggcgataaatttggtgccgtccagtacagaaccgccgccaaccgccagcaggaaagtcactttctgttcgcgaaccagtttcacggcgttcatcagcgtttcataagccgggtttggctcaataccgccaaattccagcacgtccatgcctttcagggcatccagaacttgatcgagaacgccggtttttttcacgctgccgccaccgtaggtaatcaatacgcgagcatcgtgaggaatttgttcgcgtaaaccagcgattgcgcctttaccaaacagaatgcgggttggggtgtgcagattaaagttgttcattacttgctccctttgctgggccaatatgagggcagagaacgatctgcctgatgtttttcattgtgatcgccagcgccctggctctcaatgctcatttctgccaatgtcttgcctattcctccagagtgctggagaaatgctacaaaattgcgcacaatcaaattgccgcattattcctaagaaattacgcgatatgaaacgtgaagagatttgccgcttgctggcggataaagttaataaactgaaaattaaagaaaatagtttgtcagaactgttgcccgatgtgcgtttgttgtatggcgagacgcctttcgcacgtacaccggtgatgtacgagcctggcatcataattctcttttccgggcataaaatcggttatatcaatgaacgcgtgtttcgttatgatgccaatgaatacctgctgctgacggtgccgttgccgtttgagtgcgaaacctatgccacgtcagaggtgccgctggcagggttgcgtctcaatgtcgatattttgcagttacaggaactgttgatggacattggcgaagatgagcatttccagccgtcgatggcagccagcgggattaactccgccacgttatcagaagagattttatgcgcggcggagcggttactcgacgtgatggagcgaccactggatgcgcgtattctcggcaaacagatcatccgcgaaattctgtactacgtgctgaccggaccttgcggcggcgcgttactggcgctggtcagtcgccagactcacttcagtctgattagccgcgtgctgaaacggattgagaataaatacaccgaaaacctgagcgtcgagcaactggcggcagaagccaacatgagcgtatcggcgttccaccataattttaagtctgtcaccagcacctcgccgttgcagtatttgaagaattaccgtctgcataaggcgcggatgatgatcatccatgacggcatgaaggccagcgcagcagcgatgcgcgtcggctatgaaagcgcatcgcaatttagccgtgagtttaaacgttacttcggtgtgacgccgggggaagatgcggcaagaatgcgggcgatgcaggggaattaaatacgttcccggtacagcagccgggaacggggaaaatcgtcaggcgttacagt

SEQ ID NO: 222 - DNA, 25097 bp, Escherichia coli
  source 1..25097: mol_type = genomic DNA
tgagcgtattggcggtacggtgttgggttcgattttaggtcttatcgctctgcaactggagttaatctcgttaccgctgatgttagtctggtgcgcggcggccatgttcctttgcggttggctggcgctgggcaagaaaccgtatcaaggtttattgattggggtgacgctggcaattgttgtgggttccccgacaggtgaaattgatacggcgttatggcgaagcggcgatgtgatcctcggctctttactggcaatgttgtttaccggtatctggccacaacgggcgttcatccactggcgcattcaactggcgaaaagtctgaccgagtataatcgggtctatcaatctgcattctcaccgaacttactcgaacgcccacgtctggaaagccatctacaaaaactcctgaccgatgccgtgaaaatgcgtggactgattgcgcccgccagcaaagaaacccgtattccaaaatcgatatatgaaggtatccagaccattaaccgcaatctggtttgtatgctggagttgcaaatcaatgcatactgggccacgcgccccagccatttcgtgttattgaacgcgcaaaaacttcgtgatacccagcacatgatgcagcaaatactgctgagccttgttcatgcgctgtacgaaggtaatccgcagccggtttttgccaatacggaaaaattgaacgatgctgtggaagagctgcgtcagttgctcaataaccaccatgacctgaaggttgtggaaacaccaatctatggttatgtgtggctgaacatggaaacggcgcatcagcttgagttgctatcgaatctgatttgccgggccttgcgcaaataattcctgaacttcagaatcatcttgctgctgcttcgattcagcaaggataaagggtatgatagtgaaaagggataaaagcattgtcatctgcggcagctatgagtaatgttggccctaacgaatagcggttgcttaaacgaatccgactctcacattatcaggggtataaaaatggaaactaccaagccttcattccaggacgtactggaatttgttcgtctgttccgtcgtaagaacaaactgcaacgtgaaattcaggacgttgagaaaaagatccgtgacaaccagaagcgcgtcctgctgctggacaacctgagcgattacatcaagccggggatgagcgttgaagcaatccagggcatcatcgccagcatgaaaggtgactatgaagatcgcgttgacgattacatcatcaaaaatgccgagctctccaaagaacgccgcgatatctccaaaaagctgaaagctatgggcgaaatgaaaaacggcgaagcgaagtaattcccgttttattcaatgagggttgcctggcaaccctcattgctcattgattcttatctgtgtatcaccgtcatcattctcatccgagaaccaatcgaaattaacaacagccttcttctgtatgcagcaaggcaaaaagttctgtaactccattgttattaactgcactggttactaacacgttgtgcgctccagcttcccgtaaccaacttttcaccaaagatatttgttccatgctggctaaatctgctttggttactactccaatgaccgggtgattcatggcccggtagggcgtttttacctctaattcctgcttcagcgctgagattcctgcttgttgccagaaaagcaggcacctgccgtctgaacggtatcgatccggaagcgtatctgcgccatattctgagcatactgccggaatggccctccaaccgtgttgacgaactcctgccatggaacgtagttctcaccaataaataagcgtcaatacggtgctccgttgacgcttactttaatccgttttctgagcttagatttttctgttcctacccagaccgtggatttggaattcattttttgtcaggtcaatgctaatcgttaaaacggccataacgcacctccactggaaggtttatcagtaatatcctaccgttgcttcatggtcggggcgtccattccattattatcggttttcctttctgtttataaatgaaaacgccagctgtattcaggctggcgtcaggggaaatgaagcctgttgagtgagattcaccggttctggtgcagaagctgcagatggcgcagggtaaggacatcttctcttgcctgcttaatacaggacaacagtgctgtttctgtggttaatggcactataccctgcatcactgcattgtcttacagcaactggtgagggctggcataagttgccggtgtttcggtagagtcacggtcatccaccacgcggagtgaataaccgttttcagcggccttattaatcagttcagtgatattaacaccatcaatgtcaacgacaatgtgccccatatccagcgcctgtacgttaacgctgtcggcttccagtgtcatcatttcgcctccggatacttacccagggtaatgttatttaccgttctgtaattgtcgcgggtcatcaggccggtcgccctgcgagcccggaggatatcgatgctgtttattaactgagagcgggtacaggcgctgaatcccggctggtcggtagcaccagcgcgtatttttccacgagaaagttcaccgcatcacacagtgaaatgcctgcctcaatatgctgctcaatcacacgttcatcggcaaaaggtgtgtcattcagtgtgaggccatagtgctggtccagcagtcgggacagcagtatctgccagatttcaacaggagacgggcgagaactggccgcctgcccgggtaatacaggtaatgttttcatactgaagattttcctgatatgcagatataaaaatggaaaagtggcgtggtgaaaacaccaggccgtagcagaaggctattctggagagttaatttttcatttcgggcgtcggataaacagccagataaacgtaaccacaactgctgagggtatcggctttgcaggtcagcccttttgcatacagcgtgacggtatgctgatggcggggattcagttcaccgctggtgagcatgagttccagttgtttcatcagcagcggaaaggcctggtccaggtggtacgcatctgcatcgctgaacaggcctctgataccggcgcggtcggcaaggtaatgcaaccggttaccctcctgcaccagacgtgccccgaaacagggcgtcacggtgcagggcagcccccaccaggggcggtcgtgattgtcgtcgggaagtgttgtcccggggagtgtgtctgacacgataaaatccttacagaaaatcggctaagaatggtccggtagtggcgataattctgctcatcagaattcccactcagttcagggtgacgctcatcagccggacatacggaccaaaactgtccttacggcgttcagcaaacacggccagcacaccgggaatatcctgcacttcacgaccggtatacgcttcagcactgccgtgccagcggtatttaccggtacagaacggaaaaagacgggatgtcggatgttgttggtgaatacgcatggcttcaccacgggtgataattttcataatgggatacctctgaagacagaagataaaagtgaaaacaggtgtgatgtggttgtgacgggttaaagcagaccatgttcggcaaaggagaaaacctggttgccaccgactatcagatggtccggcacccggatatccaccaggcccagtgcctgtaccagacgttcggtgataagccggtctgccttactgggtgtgacttcaccggacgggtgattgtgcgccagcaccacggcagcggcattgtggtacagggcgcgtttaatcacttcccggggatggacttccgtgcggttgatggtgccggtgaagagggtttcaccggcaatcagctgattctggttattcagatacagcacccggaactcttcacgctccagtcccgccatgttcagaatcagccattcccgtgccgcacgggtggaggtgaaggccacaccgggttcatgaagatggcggtccagggttttcagagcccgcagaatgagactgcgctcgccgggcgtcatttctccgggcagaaaggaaagctgctgcattgtccctgcctccattcagtcgatgatgcgcataatggcgctgcattccggatgctgcagggcgtaatcccgcagccggtaataatggaccgtcatggcataacactccgtacgacaggcgtgatgactgtacgtcatcagacaggcagcaatgccagcggcttccgggctcatttcagcgcggttgccgttcatggcattgaacagtacccatgtttcgtcatcatcgtcatccggttcgggtgccataaatgccccgccgttgttcagggtgtacagattccagataccaccgcagtagtcttcgcacagacggtccatccagccgaagacacggggctccagggtcacccactgtggaatgaggccaaaatgctgcggccagaagctgatgcgctgttcatcagggacgaggctggcaaccaactgaggcggattattctctggtgttgtagctgaataaattgtgggggtattctgagaaacggttttcatgagataactccttaaataacaaataaatgtgtgtttttcaggaacgaaagctgaatgattccctcactcagggaaacggcatcagcgcaggctctccagcatcgtttctgccatcacccacaatgcgcgattgagcttaatgtcggtatcaatgctgtgaatggcctgggtatggatacgttttccttttgcactgcgaccggaaatcccgcctttcagcatattctcctggatggtctgatatgcgctccacaggtccttaccgtaatcctcccggcgtcgcggcgtcagaatgtcggcggtggtgacgggctgatgttcgtcaccataacggtaagtcagtgccgcctgtgccagcgcctggcgtgccggtggcggcaggaccagcgactgcatggcatcacgcttctcctctatccggtcaaacacgcccaccacctcgtaagccccttcaatgactctgtccaccacatttccccggtgcggaacacgtacttcccccagagactgaccacagacgcagccgttctggcagacgaacctgaagtaccccggcagcatctggtagctggaggtaccgtcatgagagttgagcagaataatttcagggacatgttctccgtttatctctccggcccgccgcagacgcagcatgtgttttgtgtatccccggcggcccgggtcgcgcacacgggtctggcaggcgaagaatggctgaaagccttcccgctgcaggctttccagtacggtgatggtggggatgtacgtatagttctggcttcgggacgtgtgtttatcttccccgaaaatccccggcacatagtgcatcagttcttcgtgtgtcagcggacggtcacggcgtatctggttcgcataaccaaaacgactggctagtcgcataatttgctccttatcggtggttaagatttactggtgtaataaatgaaaaagccacgtctcccggagaagacgcggcctgatgggtgaaatgaatgacgtttattgtctgagaagaccgtcactggcgagccgcgtattaagcacctttccggcatcgggttcagaattccggcagcgccagcgtcgctgaccttccgcgttgcggataacccgacggaaatgcattcccgggtcatcctggataaacacattgcggtaagcggttatgacagcaaccgcctgcccgtatgagaaagatccttcagccaggacatactctgtgtaacccggcatatctgttttctcctgataaataaaaagcctctgccacgcgttgtgacagaggctgaagcatgaaactgacttcagggatcagttaacgttttttccggaaacggtaatcagcagtggatggtagtcctggggattgaaaaccgataacggcagactgacacgatggccgttactttcttcagttgctttaatgatttcggttgtggcgacattttccacgcactccgtttccagaaatgcgtctgtggttcgcgtggcattactgtcaccaaaagcttccgtttccatttttctggtcaccagcgtctgaccatatttgtctttgagttgcagagtgatggtgagggggccaaatccttcatcgtttccgccattatccagccggaactggtaagcacaaatatttcccgggagccatatcgtatctgtattgcgtatactgatgtaacgttgatcctgtgcccggagtggggcagaccacgttaaccccagaatgaaggcggtaatcatgcaggttttgaacaggtgaatcatggtatttacctctctgagtcatgacgatgacactgacaaatcaggtgataaagcgtaaaaggcgcagaatagccgttatgccggtaactccgggggtaatgcttcttccagtcggttaaccatattgccgagatgggatgcatcatattccatgacggggcgttgcctgatgatactgaccaccagtggtttgattaacatattggtcgcggcccgttgttgtataccggcggcgaaaatgatctccagagcattctgatcgataacacgggccagattctcgttcagattttcaatctcatgtccggtcagcaggaaactgccggcaagccatgtcacctgctcctgaatcattgccagaattttgacgcgatcttcttcaaccagcgctccggcaatttttcctgatacagcggaggcaatcattccccccagaacaccgccaaccacacgccctgtcagtgcaccaaatggtcccagtggactgaacagtatcccgcccgccactgacccgacagctccacctgccacaccggaagatgccacggcaagnnnnnnnnnnnnnnnnnnnnnnnnnnnnnnnnnnnnnnnnnnnnnnnnnnnnnnnnnnnnntgcgcaccggagatccgtccccgcaacattttgatcatgtcagggccggttgtgacagctaccagtgccagagatgtcaccagcgtacccttcattactttgttcagggcactgatatttcctgcaccggtccccttctgaagagccagtcggacagtcgggctggcagtcgaaaaatcaatgtgcttcagcataccctgaacaacactgagccggtggagttgctgggttgtgacgtagacagccagtgtgcgggtgaaggtttttcctgcctggacagcagctgtctgcagggcagcatcgcgatcgccggtgctgagccagaagaccgatgccgtcagggcaaaactgatccctccggccgccagactgacaaccgaaccctcggcaatatcataagtgaccgattcgatggtcccgaaccgggtgatattacgggcctgagtataagtcagatgtccccgacgaatcagccgggacgcttctgcgggatcggttacaccgggtactttaccttcgcggatcttattcctcatggtttcaacagcgccggcatactgatcacgggggacttccagttgcatggggccattatttcccatgtaacgatactgtccgttttgtccgtcgaatgccgcaccgacgctacgggctgcagttgaacaatatttcgtctggatttctgttccgctgaccagtctgtctgctccatttctggcattattatcaccgaggatccgtgcgtttttcagacggactctgtcgacaatatggtttccccgttcagcggcaaacccatgtccctgccctccggaagcaaacattttctcatttgtactccaggtttccggcagtttcatgagaatcagaccattcgccgttgcatcggaaataaagctgttgtaagggcgttcataaatttcctgacacagtgtttctgtttcgcgacaaagagaggagcagtaccattccggatccggcttatgattttccggggcatgatgtacttctgtcagcccgcaggaggcacagatacgaagctcatccacgtgatggaatgatacaaaacggcgaccttctgaaaagggataccagtcaccgccgtccaggcaacgatcgagaaaatcgtcattcgcttccggtgataaattcaggcggttccggnnnnnnnnnnaagagcgttttcagttcatcaggtgtgaatgacaggttctctttcaactgttcgttaaaccctgccatgtttctttcataccaggcattgttcagtaaccagtttccgtctgccagttcaaattccctcagctctccccgggaaatccgttgagaaatgagcgtcagccagatgcgctccgtcagtgagtcaggaaggctgtaatcgttttgcaaactggtcagccacgatttactgttgagcaccggttgttcttccagtgtctggctgatggcacaggtcagttttttcagcgcctggatctggctggccgcccatagcagcgtcactaatgcagccagccagtacaacaacccgccccaccacatcagtgacggtgaaatatcgtactgtaacgcgatcaatggtgcgcatgcagaacacgccataaggaaaaaggcagtataaaaacagcagtaatacccgttaatttccttgctgatatcttctggtgtgatcccgttctgctgaatgtttttgatctgcaggggaacagccagcagaccaccggcgagagcggtggtcagaataaatttcacagagtcaaaggtgtgagcctccagcgcgatatgtttaccatcaagtccccacatgaagctgatgatcattccggcaatcgtcagaaatacgcctgccagccagcgaatatggaacaaccgggttatgcgttcggtgatatagccagccagtaaggccgggccgaacagacacagcaatatgagccctgccagcgcagaagccgtgctgattaatgctctgaacaaaaggcgaagaatggcaaatcctgcgatcagcaggatcagcgcgccgactatctgtaacatagtcactccgtgatgaatatcatgttattgttaatgccagcgaatgtggcgttgaagatccgttgcgccggtccgggtcccggtcatgatgaccgggaccacagagaggcgatggttctgtcagaaggtcacattcagtgtggcctgaccgttatacccttcagcgctgctgccgctgacgctgtggacataacctgcctgaacgcccagggtgatattttcccggacacgggcttccagtccggcctgcaggtccagtgacgtaccattctgtgacggtgagaacgtcatgttactgccggctgcggctgtacccatgctcatgtccccccgggagctgaaggtgcggataacagaaggctgtacccaccagttcaccggcagttcacgcacactgtgtttggcactgccgcgcagggtgtcacgggatgaggtgcctttaccaaagttcatatcgttgtggctgcccagacggaagccggcacgcacatgttgtgcactgccatgcccgaacttcacataaccggcgttatcctggccgtcatccagggagagtccctgccaggtgtactgcagttgcggctccagcatcagattgtcagtgatactgaagggcagaccggtttccagcgaacccagccagccccagccccgggcgcggaagtcgttattgtccgatgaggctttcatgctgtggcgggttccctgggccacaatgtcagcccacaggccggaggcgttgtgtatcagattcaggtatccgcccaggctgccggcatcatcccggaccgtgccggcacgggagccgtcatcatccttaacatcaacggaagaatggccagcagcaccatatacccccgcggtcacagacataccggcaacctctgttctgagcaggtcaccctccagacggacgaagccatagctgccgctgctttccggcgtggctccacgggcaataccgccgttgttatcgtgaccgagatgaccgccctgaatgctgagacggacgctgttattttcaccgcttacaccggtctgatggctgcgggagcctgccagaatccggtcatagtccattgcctgtgtcagcatggaggcatacagggggacttctgcacgataagcattttcactgcgcagataccagctctcatcactgtcccggttgagggagtagttaaaggcaccggcctgcagcttattcccctggacaaaggccccttcctccgtggtggcaccgttaatggcttccaccacctgaatacccttaccgctggtcgccagccccgacgcactgttgccggcgttcaccaggttcaggatggtttttccggttgccctgccaccgtcaatgaccagtctgtcagcattgttctgtgccatatccgggcgtacacgcaggctgatggtgccattctgtccgttcaggtttttcactttcagggttgccggtacgaacttccctgtgcgggtggaggtgaaatgaatctgtccggcatggctgaggtcatccaccaccgactgcaccgtggcgttatcgggaatattccaggtggcaccagaggcgagagtgacattcgtggggtcaatggcaccgttcagcacagtgctgccggtcagcttcagggctgtaccgcgctgagcaatgacatccgtggtgacggtactgtcgttcagcgtcagcgtgccttcattcaggttgacggctttctgggtgagtgtggtgttgctgacagtgagtgtgccacttcctgatttttccacgctgccgttaccggtgagagagcctccctgcaggagtgcatcgccttcacggatggtcagggtatcgttgttcaccgtcttcccggaaagggtaagtatggcgccgttattcagcgtggtggtgcccgccagtgtgccgcccctggcggtgaacagtccgccatttaccgtggtatccgtggccgtatcaccggcgttcagcgtgaatgaactgcctttttccagcatcagggcatccgcctgaccgcctccgatactgaatgcctttccgtcgcttcgggtaccactgacagcggcaccggaatcggccagcagtacaccgccatttcccatggatacggtggtggcggtgccaccgttgcggacatccagcgttccgccatcatccacgcgggtattagtggctgtgtgtccggtcagcacatccaggcgtccgccattttccagtacgacattatcagctttaccctccacaacagagaatgctcccaggcggtttatgccggtaacggttgcagccgtactggtaaccagtgcgccgccctgcttcagggtgacattcgtggctgtaccaccggcgtccacctgcagtctgcccttctgattaacggtggtattcccggccacacccccgtttttgacaatctgccagccgtcactgtttacaacagtgccagacgccgtaccgccgttgtgcacatactggtaccccccattcagcgtggtatccagtgcgtgaccatgtacagtctggtcgccgccggcataaaccacagtggtatttgccgttccttcagcagccacaatctgacgaccatttttattgatggtggtgcgtacggcatctccgtagacggtctgcccggtatcaccattttccgcatccggtcccccttccgcgccggtattcacaaccgtgtcggttgccactgcgccggatttgatggcctgccagcccttctcattaatgacggtacccgttgcaatcccgtcttcatgtacccactgctcaccgccgttcagagtggtgttcactgcccgtccctgaaggctctgtccgcctccggcactgataaccgtgtctgaaacgcttccaccggggttcactctctgaagaccaccactggtgacagtcgttttgttggctgttccgccatcctgtacccattgcccgccggtattggcctcgttatccggcccatactccagcccggtactgatggtcattccgttggtcgtaccgaagacaatctggttgtcatgatttgccagtgttccgccgttcacggtttctcccgggtgcacaacgatgtcagcagccagcaccgggagtgacgtgactgcggcaagagacagtgcaaccgccacaccgccacgtttaccccgtgcgcgggccagttcggaggcaaccacgaaagcgcccgtaatgtgattccataccagcctgtagcaggtattcagatgtcgtttcatcagcttttccttagattgagggtgaataaaaaagccggtacccacaaacgtggataccggcaggtaaagggttacagtgccggaggtccggctgtgggagtttctgaattgtggttctgttgttccctgaatgtctttctgtacgtatctgtgcatgttactgacaaaggttattattagcttatcgatcgatataaacgatcgataaaatagatatcgatcgttttattctattattgagctattgcacggacaagagagacagtaacgaaaacagtgcttttgtgagcagactcagagtcagggagggcatcagtcacgacaggttcagaagaaaatccagttccataccgcacgggcaacagagaccaccgtgtcacgaacagcgcgcagggccgtacggacaacagaggcaacacagacgctctccgctgtgtcaaatatccggtccaccgcaccggtaaactgttcacgggcctgagagcggacagattccgtgcgcagctcgtcctgcagtcgggtcatcaggggactggcggcatggtcgggaagcgctgtcatgagcgcactgaccagcgtatccagttcccagccggtgcgggccgatacggccacaaccggatgtacgggccggaacagacggaataccgcctccgttttttcgcgaatattctgtgcctgtgcaggagaaggctgaataccggccatatcccattcatggcagggctccgttttgtcggcctgcgtcaccacaaacagtacccgctgatgtccccggtgcaggatgtgtcgccagaaatactcatccacagacagggcacggtcatcggctttaatcagccacagtaccaggtcaagttcaggcagaatgtcacggtacagggcctcatactctgcatccctgtcccggctctcgcccaccccgggcaggtcagtgataaccatgctgtgaccgtggccactcagacggaagcgccgtacttcccgggtgccggcgtgaacatcactgaccggggtgacctccccctgaaacagtgcattacagagtgaggatttaccggccccgcttttacccataatgccaatcacgggttcgtgacgggtgagtttgcgcagatgttccaggatgtgacgggaaagcgagtaaggcagggaggagagcggtttttcaattgcctcaatggcatcagacggattcatacatgtattcccggtgaaaaaagacaaaaccccgcgcaccggaaaggtggcgggggattcacggagataatatctgtctgaaattgtttttaatcgatgggattgttgcgtattaacatgaaggagatcaggacttatccgttactgggtgatctccttccatgaaaatacgccgttattgttaaacagcaggctgatttctccgtaaaggggaaaatatttatcggctgcatgattatcaggtgtgtctgtgtttactgctgtgagtatttttcagtgtattgtgggggagatgtcagtgggagatattaaatttacatttataattatcttacttcttctgtgtgttttttataagagtgcacacgtaatgattgataccatgtggttaagtgtttcccttcctggtcatgcgtaatgattaaatgcttttgtgacaccattcttccggtctgaatatttatcccgttcttttttatttgtgcagtgatactgtcggaagagaattcagtaatgtgaggtgtcctggtcaggataatatctgctgagatattattagttgagtgtgtttttactgagcaaaagctggcttttaattcctgtactgaaacactgtcgctcgtccggggttaactgaaactggatgatgatgtaaaatgaaggctgtttttgtgtttgtcgaagaagtgttattttaatccattctcatcattggctggcgattatacagaagtatttgaagaaaaaatggtgcattttatctgcgtcagcagggaggaagtattttattgatgtatcagtattaaatggtttttgttatttataaatatgtcatcctgtccatagaatattgtactcagcattcagtgcaggaactgtagtcttctttattttattcttcttcaggagggggggattcctgaaggcgttattcccggtgttctgtttatgattcatcccggcaggaaaccggtatctgcaatacccgggatgatgctttttgttcgtacgtggttgtgtaaaatttgaatagtggatgtgctctgaagggaaggaggggacacacagattcattttgtctttcttcagcagcaaaacacactgtggttattatttaaccattaaatcaacaaaaatttttacctcatattgatttgactgctatttttgctattaatagccagaattgcagtgcttttatatctgtgtatagtgaggttactatgtcattcggtcagccttgtgatgagtttcccctgagttcgctgcctccactcattcgtgatgccgttattgaagctcagcaaattacgcaggctccccttgggcttgtggcagcgtctgccctgggcgctgtttcacttgtctgccagaatctgattgatgtctgcagactgaatacactgcgggggccggtctctctttttttcctgacgcttgccgagtccggagaacgaaaaaccgcagtggacaaattattaatgaagcccctgtaccagcaggagatgcagttatattccagatacaaaagtgaactggctgtctggaaaaacaaggaagagcttttaaaggctcagaaaaaagcattgttgtcaaaactgaataaagaactccgcaaaggcgcggatgagtcagaaaccctcagacaactggaagtacttcagaaaaacagtgcggaagaacctgtgaggtataaatttaatgatgccacgactgcggcaattaagaatcagctttgtggtaaatggcgttcagttggtattatgtcagatgaagccggtattatatttgatggatataccctgtctgagttgccttttattaacaaaatgtgggatggctctgtattgtctgtggacagaaagaatgaacccgaacagatgattgaaaatgccagaatgacgttatccctcatggtgcaacccggtctttttgaccgatatatggagcgaaaaggttctgttgccagggacagtggttttcttgcccgttgtcttatcagtaaacctgcaaccacgcaggggaaacgctttattaacggagctgtgattccgggaggatcattaacggcatttcatgaacgattaatggaactggccagaggcagtattgaaaaatccagtgaggatgaacggtattgtctgcatttttcgcctgaagcgcaaaaaatatttattgagcactataatgttctggagcaggatttatccccttccggacccttaagcccgtttcggggacatgtttcaaaaaaaacagaaaacattgcaagaattgcagcgttatttcagtatttcagctatggtgaagggaaaatctctgccgatatcatgacgtctgctgtcgtaataagttcgtggtacacagatgaatataaaaaattatttgcgttacctgatgaatctgaactgcagcagaaggacgccgaggagctgttcgactggctcattgaggagtgccgcggagaatgcccgccccgtgtcaggaaaaattatattctccagtgtggcccgggccggttcagaaacaggaaaaaactgaacgcattgctgaacattcttgaatctcagttcaggctttctgtcgtgccggaaggaaaaaccatgtatgttctgcttccccagatagccagtttaaagttgtctgatgtctctggtatttttacctcgggttatcactacaataagctgagagcgaagtaaccggtgagcagtttttctccattatgcttcagacttagatgattgattattatggggatttcatcaccgatattcagatgtatgaatatcggtgatgaactaaagctcaggagctgcgtggtggtgatgaatcaacaggcatataactgatacccgccggtcagaagttccagcctgcgactttcctgtctgcgtgcccgcagtccggcgttcaggtgcagcgtgtgacagaacgcacggagagcgaaacggcaggcagacaggccgttcagtcagccctggcaccctgcccggataccagcttccctgaaacaactggcatcaggtgcgcttatcgtcaaccgttgtgcggtatgccaggagcacgtactgatccatcagatccgtcagtgctgcgctctgcttctgacggttgatgatccattcctccagctctttttctgatttccgtttcagattctccgtccagtcgtcaaggcagtttccggtcattaaatcaagccagcaaagccagaccagtttgaggcgcaactccgtgccaccaaactgacggaagaggctgatcagtttatttgccagcgaacgctgcctcagacgttcacattcagacaggagaatgccttccagcatcggatgatgaaccagcagatgttcactggtgcataaattcactatcagatcatcatccaggggcggcgtggtccgtttgtccggaccataaatcagccggtgcagactctggggtacgatggcaatctccggtttttcaccattgaatgacacccacccgggcgtcagattatggaagtagtagatattcggatgacacacgccccaggatacggcgtgccgggtgaagccggtcagccatttctggtagctttcgtggagcagctcgtaacgggtctgatactgtggtttcattttcatattcctcacgggggataacaggcagcagaacgccgccggcaggccggagactgcgtctgttgcagatgaacggttaagaattacggacgggactgtgcaatacgcgcctgcagccaggcttccacttcgcttttcagccatcgggagctgcggcccattttgatgggcgcaggaaagtcaccatccttgatgagtttgtaaaaccacttatcggtcaggccggtcagttgagtgataaatgccatgtcgaccatctggtcatccatcagtgaaactggggtgagcatgagaatgttcctccggatgttgttaaaccagccggtgtggtcatgaaaacaacgcaccaccttcaccggcataacaaccggggagaaacgtaaaaaataatcgggaatgtgaccgccaggagataaacggggaggttacggtggctgagccgtaccggtatgccgggtggttgttacgaaacgatgcttccgcacgcgcgcgcgataaagaagggatgattttcgtgaggaagaggggaaaactggcgttctgataattgcagagttatttacggggcggttacgatggggcagaccgtgtccggtgggcaggcgacaggtatcaccgatgggataagactgtctgattggtattataaatatataagagagatcaaacacatgagatcaaatacatgagttcatatatgtgaaataaacacggtgagtgtgatcagtgggcatgatgagaacgcagtagcaacagactgcgctatccctgatagctggcgtataacccgcgtatataaaacgtatctgcaatgtacgtgaacagagtgcattaagcatccgtctgagcggtaaacatatccgacctggtgagtgacagtctgagagaccggttaagtggtggctcgggagtaatgagtttggggtgggtaccagaatgccagtctggcggtatgctgacagtatcacgttaattgcagcataaagtgatgagaggctaatggaagttaaaaccaaagcagttccgtcgttgttcatcccgggagacgctggaaaaagtgatttcccacacgcgttataaacttacctctgcggaactggaagccttcaactctgtggttgatcactggctggcagaactgacaatgaacaagctttacgatcgtgttcccgcttcagtctggaaatatgtcatctgagcgttcggtaatcacaactgcatcgcaccaggtgttatccgctttgtgattcttattggctcttctcaggttattaaaagctgaatatgttcctgttgtcgggaaccaggataataccgggaacgttaagcggtatagcgacaacaaagaattcgaaatcaaaagggaatggtgccggaggcgtgggcggtaatgggctgattttcaggtattaccggcttacagcgtgtggttgatattgaggggctgtgagtttcgcgtatttgtcagaaacccagacgagttttcctgtatgggacgaaataaggcagcggcaatacctggaaaaatttaatatggtatgaaggagaacctgtcggttacgcttaatatacccggtacactgtcagctcaggggatacatgaaccgttatctcaccagctacacagtatatacacactgactgacgctgacagtagtcagcaggaccacaataatcagtgccagcagtatggtaacgatacggtctgtattccggtaatagccgaaggggtcgacagaaccacaatacgggcaacatgtattatgagtaatcgcgtttccacagtccctgcacttctttttgcgtatcaccataactccctcctcacagccttacccgtaaccggttttttacattaaaaaaacaatgctgaaaattcaaccgtcagtccggagacgatagttggggtatcacagagtgcctgagacagtgtcctgccggaggtcacttcagggactctgcgcattttttacgacgtggctattccgtatgaaccatacggagatttaaccatgacctacaaatacaaccccttctggcagcaacgtattcgtgagacggtgcggcacgcactgaatgttcatccccgcctgacggcattgcgggttgacctgcgtttcccggatgtaccggcagcaacggacgcagctgtgatatcccgcttcatcaatgccctgaaagcccgaatcgacgcttaccagaaacgtaagcatcgggaaggtaaacgcgtgcatcccaccaccctgcattacgtctgggcccgggagtttggggagtgcaaaggtaaaaaacactatcacctgatgctgctggttaaccgggatacctggtgtcgtgccggtgattaccgtgctccgggatcactggccgggatgattaaacaggcgtggtgcagtgccctgggagtggatgtcgggtgccatgccacgctggtgcattttccggcctggccggcggtgtggctggaacgcgatgatgacactggctttcagcaggtgctggaacgtgctgactatctggcgaaggaacataccaaagctcactgcaccggtgagcgcaattttggctgtagccggagttgagcacgactggcgcgccaatatccggcaaaccaaaagtatgggttgttgtctggcggcaacgatgtatccactcgcccactgactgttttttacgtcagtgttccattgtgtgacaaccacagtgctgtaacagcaaccagcctgctttacccaaactccagtccagattttaactgaaccgccattcacaccctgaccacgctgcccgtaccgggacggctgttgcctgcgtgtcgtctggcggctgaggaatatgactatgtacgcaaaatcctttatcgctcttgatggcaacggacgtctgacgggcgcccgtactgcacaggccgcaccttatgctaactacacctgccacttgtgtggcagtgcactcagataccatccgcaatacgacactgaacttccctggtttgaacacactgacgacaggctgacagagcacggtcaacagtgcccttatgtcaggccggagcgcagagaaatacagttgattaaacgtctgcagcaattcgtaccggatgccttacccgtggtgcgtaaagccagctggcactgcagacaatgtcaccacgattattatggggagcggtactgcacacactgccagaccggaggattcagtattccccggacaactcaggaggaaatatgcgaattctgaactgttatatggcgaatgacagcaaaggccattttgttacggcgaaagaagcagcgaagcacaaccgccaggacgttttgtgctgtgtgtcctgtggatgcccgttaacacttcagcggggcaatgacggacaaccaccgtggtttgaacatgaccagatgactgtcgctgagaaaatcctgctgcgatgcacctggcttgacccggcagagaaagaggcccgtcgtttgcatctgcagggtatgacggttccggattatacggtgaaggtgagaaagtggttttgtgtgatgtgtgacgaagattatgaaggagaaaagtgctgcccgcgttgtggtaccggggtatacagcagggagggggggctgcaggaaggcaactggaaggataggaactgagcggttcagtcgcggaaatcagttgcagagctgtaatgatatctccgggagtgctgcgttggtaggggcatcccgggatagagaaattttagcactttgccctgaatgattgtagacgttccgagtactcgtaccggtctgagttattacagttagatattcactttttctcccgcatacttcacatctgtcaacgacggatgaaaagtggttcttccgcaacctgggtggaagaaaatggatgaaactttctggcgaacaaggatctaagctgttttaagttatgggcaacgcaatgcactctcttaagacacttctacagttaccttgcggatggcgatgcagtcgacaaattattagctctgacggtataaccctccatctccacggaaaacgcaaaacagcacaatgtcctgaatgctttaagcgtagcgactctgttcatagttgtcgtcggcgccggatacagcatctaccctgctcagggcagacgctatggcttgtattttccgtccgccactggtactgccgtaacccggcttgttcacgtaaaatttttgccgagtcgcttgctcccttcgccggttcacaccagcagtcttcacaggcgttacaaaatttacaacgtcaactgggattaatagctggaggtgaggctggaaaacgggctgcaacggcagcgggtctccgttgcagtgctgatactcttcttcgcagggttatcaataccccggagacgaaacagtcaggcgcgcctcatgtcggtattgatgagtgggcgtggcatcggggccactgctgcggtatgttaatagtcaatcttgatactcaccgtcccctcgtcctgcttcccggccgtgatcagcgtacgctggcgacctggttcagaaaatatccggaaatacaggttgtctcgcgtgatcgcagtggagtctatgcgacagcagcacgtgaaggtgcacctcaggccagacaggtggccgatcgatggcacctgctaaaaaatattggtgatgagcctgaacgaatgatgtacagacatatgcctctgatacgtcttgttgtcagagagttatcactgaagaaatcacctgagccagaaatatctgtgcctgtagcatcgctccgtcgtctggaacgccttaaacagcacatccgcaaaaaacggcatcagcgttggacagaggttatggccctgcataacaagggatgtagtttcagggaaatatcccgtattacaggcctgtcgcgagtgacagtcagtcgctgggtgggttcaggaacattccctgaaatgtcaactaggcctccaaagcgagggcttctggacccatggagggagtggttaaaagagcaacgagaatgtggtaattataactccggccggatatggcgggaaatggtggccaggggggttacaggcagtgaaaccatcgtcagggatgctgttgccaaatggcgtaaaggctggatcccaccggttactactgccgcaagacttccttcagtgtcccgggtaagccgctggttgatgccctggagaataatcaggggtgaagaaaattatgctttccgatttattagtctgatgtgtgaaaaagaaccggagttgaaaatagcgcagcaactggtactcgagttctaccgtattctgaaaacctaaaataaatcacagctaagcagctggttcactcgggtccacgaaagcggctcannnnnnnnnncagcagaacttcggtgcgtagctgcggggatggaagctgatgctgcggctatatgtgaggcaatcagcagtcgctggagtactggtgttgtcgaaggtcatgtaaatcgcctgaaggtgctgatacgccagatgtatggtcgagccggacttgaactacttaggcggagggtaatgagtccactggcatgaaaatcttcacccaggttgcggaagagccacttttgcactgttcgtgacagtatggcctttatgtactcactttgttaccggtagctggatcatcactaccgtgctgcaaatggtggtgaacagcatcaattgtggaatgaatgttgccgaagcgaccaatgcgcctcgtttccactatcagtggttgccggacgagctgcgtgttgaaaagggtttagtccggatacgctcaagctgctggatgcaaaaggtcagaaagtggcgctgaatgaggcgatgggcagcacgcaaagcattatggttgggtcggatggtgagttgtacggcgcatccgactcgcgcttggtggatgatttaacggcggggtattaattgacatcccccggcgcaatgtgccgggggataatggttttatgcggtcaataatcgtccgggattatcgatacagagttttttgaggatcgttttatcgacgccgcgctccgccagataggccagaaaaacatctggaacaaatccccagccattaccgccatttttagcccacatttgtttaaggaagacatcgtggctgagaacaagctgatcggcgtatcccaactcaatgagatgagcgacggcacacccctggcgctattccctctttcgggaaggtaatgtctaggccaatcatgtcgaattccagccagacacctttatcaagcattttccgctgatacgccacgtcttttcctgacggatccgagtgtgcgagagagactttatttggcgagacgcccatttcacctaacacaatgtcgagtacttcatcaccgcgacgaagccagcccggcatgtgaatattcatcgccacatgaggattgttaatctgtgccagcgaggcagcccgcaagctgttatgctcggcttcggtaaatgtcggtgaaacacctatttcaccgatcattccggcacgaatatccgtatcgccaatcccttgattcaattctttatcgatcgttgtcgccagttcatcaaccgttttatgaattctctggctttcaaatttttccaggtagggaccggaggaagcaacaatattcagacctgtttttaatgcgacttctcgtaatgcctgcgcatctcgtccgatagactcagaccctgtggcatcaacaacggtccgaccaccgagcgagataatgtcatcaatttcgaagaccacatcttcaataggtatgcggtccacattatcagcgcagcaataaggatcgtgttttaatgcccactggatttctgccgtgacttttttatcaacaagccgttgtgaaaaaggatagcaaggagcatccacaacagaggaaagatcgttgaacagatgttcatgaggaagtgttagccccatatcttcacgggcgacggggcccgtcacagtttgtagataatctttcatgattatacctccattttcttcattgttttcgaggttctgtattccggaatagtggtaacaattgcaccgaccagtgcaaacagtgttccgatgatcgtgaccagataaacgctattgcccagcgatggaattaatacgtcaatcaatactgatcccagtaactggcccgccgttgaagcaacccccagcatcagtaaccccagacctctgaccaaaatggccattaaaccgatagacattagtccaagcgggccgccaagatacatccaccagacatctggtaattgaacagtgacgtgccctaatgcgacacgaatagctagcgctgtgcctaaaacacaaaatccaacgatgaaattctaggtgattgaaaccagcatggatcccgtagcttcagctacttttgcatttccagcgggctgccatcctgcaagcaaaccagctaagaacggaagaatggcaagtaagatgaaagaggtagaatgccactgaggtgacacaacaaaaatcgtagcaataaccgcaaataatgcaccgatgatgcgataaggggtaaagtattttttctcgtcgacaccgataccaaagcgatcgcaaagtaaaccagacagcaatagcgcggagatcagtgcggtttgaaacgttgcgaccccgagtgcgctggctgatgcgccttcagaaaataccaccatcgctccacagagaccggcaaaccagttccagagaggaacttttcggtttttaatcagagaaggaattgccgcaaattgttgccgggtttcttttcgcgccataataataaaaaacatcacgactaaaccactggcaaaggagataactgcgcatgcattaccatcctgtaaccagtgacctaattgaccattcaccgctgattgcataggggagagcatacccgcaagaatcgtggcaagcatccataagggagttgagtacttattctttttcatacatcaatccttctattatagtaaatggagtaactggagttaccccattattatta

SEQ ID NO: 223 - DNA, 24697 bp, Escherichia coli
  source 1..24697: mol_type = genomic DNA
gtattatactgtagcctcgtgtctttcgaggataagtgcattatgaatatcttacatatatgtgtgacctcaaaatggttcaatatcgacaataagattgtcgatcaccgcccttaatttacccttctgtagccatcaccagagccaaaccgattagattcaatgtgaacgattagtttgctatatcttaattttgccttttgcaaaggccatctctcgtttatttacttattttagtaaatgatggtgcttgtatatatacatggcgaattaatggatattgcagatgtaatattcacagggatcactgtaattaaaataaatgaaggattatgtaatggaaaactttaaacatctccctgaaccgttccgcattcgtgttattgagccagtaaaacgtactactcgcgcttatcgtgaagaagcaattattaaatccggtatgaacccgttcctgctggatagcgaagatgtgtttatcgatttactgaccgacagcggcaccggggcggtaacccaaagtatgcaggcagcgatgatgcgcggcgacgaagcctacagcggcagccgcagctactatgcgttagccgagtcagtgaaaaatatctttggttatcaatacactattccgactcaccagggccgtggcgcagagcaaatctatattccggtactgattaaaaaacgcgagcaggaaaaaggcctggatcgcagcaaaatggtggcattctctaactatttctttgataccacgcagggccatagccagattaacggctgtaccgtgcgtaacgtctatatcaaagaagccttcgatacgggcgtgcgttacgactttaaaggcaactttgacctcgaaggattagaacgcggtattgaagaagttggcccgaataacgtgccgtatatcgttgcaaccatcaccagtaactctgcaggtggtcagccggtttcactggcaaacttaaaagcgatgtacagcatcgcgaagaaatacgatattccggtggtaatggactccgcacgctttgctgaaaacgcctatttcatcaagcagcgtgaagcagaatacaaggactggaccatcgagcagatcacccgcgaaacctacaaatatgccgatatgctggcgatgtccgccaagaaagatgcgatggtgccgatgggcggcttgctgtgcatgaaagacgacagcttctttgatgtgtacaccgaatgcagaaccctttgcgtggtgcaggaaggcttcccgacatatggtggtctggaaggcggcgcgatggagcgtctggcggtaggtctgtatgacggcatgaatctggactggctggcttatcgtattgcgcaggtgcagtatctggtcgatggcctggaagagattggcgttgtctgccagcaggcgggcggtcacgcggcattcgttgatgcaggtaaactgttgccgcatatcccggcagatcagttcccggcacaggcgctggcctgcgagctgtataaagtcgccggtatccgtgcggtagaaattggttctttcctgttaggccgcgatccgaaaaccggtaaacaactgccatgcccggctgaactgctgcgtttaaccattccgcgcgcaacatatactcaaacacatatggacttcattattgaagcctttaaacatgtgaaagagaacgcggcgaatattaaaggattaacctttacctacgaaccgaaagtattgcgtcacttcaccgcaaaactgaaagaagtttaattaatactacagagtggctataaggatgttagccactctcttaccctgcatcctcaataacaaaaatagccttcctctaaaggtggcatcatgactgatcaagctgaaaaaaagcactctgcattttggggtgttatggttatagcaggtacagtaattggtggaggtatgtttgctttacctgttgatcttgccggtgcctggtttttctggggtgcctttatccttatcattgcctggttttcaatgcttcattccgggttattgttattagaagcaaatttaaattatcccgtcggctccagttttaacaccatcaccaaagatttaatcggtaacacctggaacattatcagcggtattaccgttgccttcgttctctatatcctcacttatgcctatatctctgctaatggtgcgatcattagtgaaacgatatcaatgaatttgggttatcacgctaatccgcgtattgtcgggatctgcacagccattttcgttgccagcgtattgtggataagttcgttagccgccagtcgtattacctcattattcctcgggctgaagattatctcctttgtgatcgtgtttggttctttcttcttccaggtcgattaccccattctgcgcgatgccaccagcaccactgcgggaacgtcttacttcccgtatatctttatggctttgccggtgtgtctggcgtcatttggtttccacggcaatattcccagcctgattatttgctatggcaaacgcaaagataagttaatcaaaagcgtggtctttggttcgctgctggcgctggtgatttatctcttctggctctattgcacgatggggaatattccgcgcgaaagctttaaggcgataatctcctcaggcggcaacgttgattcgctggtgaaatcgttcctcggcaccaaacagcatgggattatcgagttttgcctgctggtgttctccaacttagctgttgccagttcgttctttggtgtcacgctgggattgttcgattatctggcggatctgtttaagattgataactcccacggcgggcgtttcaaaaccgtgctgttaaccttcctgccacccgcgttgttgtatctgatcttcccgaacggctttatttacgggatcggcggtgccggactgtgcgccaccatctgggcggtcattattcccgcagtgctggcaatcaaagctcgcaagaagtttcccaatcagatgttcacggtctggggcggtaatcttattccggcgattgtcattctctttggtataaccgtaattttatgctggttcggtaacgtctttaacgtgttacctaaatttggctaaatccttcaggaagccagccatttcgctggcttcttgcctgtcaggaaatcacttatgtccaaatggcaactcgcctgattctccttcaccacgtatgctttgcgtcaccttactatcaggacgctttagcccatgtcccgctttttgatttgtagttttgccctggttttactttatcccgccgggattgatatgtacctcgttggtttaccgcgcatcgccgccgatctcaatgccagcgaagcgcagttgcatattgcgttctctgtttatctggctgggatggcagctgcgatgttatttgccggtaaagtggccgatcgttcagggagaaagccggtcgccatccccggcgcggcgctatttattatcgcctcggtgttctgttcactggctgaaaccagcacgttatttcttgcagggcgctttctacaggggttgggcgcgggctgttgttacgtggtggcgttcgccattttgcgcgacacgctggatgatcgacgtcgggcaaaagtgctgtcattactcaacggtattacctgcatcattccggtgttagcgccagtgctcggacatctgattatgcttaaattcccgtggcagagtctgttctgggcgatggcaatgatgggcatcgcggtactgatgttgtctttgtttattttaaaagaaacgcgccctgcggcccccgcagcttcggacaaaccacgagaaaatagcgagtcgctgcttaaccgttttttcctcagccgtgttgttatcaccaccctcagcgtttcggtgatcctcactttcgtcaacacgtcaccggtattgctgatggaaatcatggggtttgagcgcggtgaatacgccaccattatggcgctgaccgctggcgtcagcatgaccgtttcattctccacgccatttgcgctgggaatttttaagccacgtacgttgatgatcacctcgcaggtgttattcctggcggcggggatcacccttgccgtttcaccttcccatgcggtttctctgtttggtatcacactgatttgcgccggtttctcggtcggttttggcgtagcgatgagtcaggcgttagggccgttttcattacgcgcgggcgtagccagctcgaccttaggtattgcgcaggtttgcggttcgtcactgtggatttggctggcggcggtggttggtatcggcgcatggaatatgctgatcgggattctgattgcctgtagcatagtgagcctgttgctgattatgttcgtcgcgcctggacgccccgttgccgctcatgaagaaatccatcaccacgcttgatctcaatttgctgctctgtctgcaactgctgatgcaggagcgcagcgtgaccaaagcggcgaagcggatgaacgtaaccccttcggcggtgagtaagtcgctggcaaagttaagagcatggtttgacgacccgctctttgtgaactcaccgctggggctgtcgcccacaccgctaatggtcagcatggagcaaaatctggcggagtggatgcaaatgagcaacctgctgctggataaaccgcaccaccaaacgccgcgcggcctgaagtttgagctggcggcggaatcaccgctgatgatgatcatgcttaatgcgctgtcgaaacagatctaccaacgttacccgcaggcgaccatcaaattacgtaactgggattacgattccttagatgccattactcgtggtgaagtggatattggtttttccggtcgcgaaagccatcctcgctcgcgggagctgttaagctctctaccgttagccattgattatgaagtgctgtttagtgatgtgccctgcgtctggttacgcaaagatcatccggcactgcatgaaacgtggagtctggacacttttttgcgttatccgcatatcagcatttgctgggaacagagcgatacctgggcgctggacaatgtgttacaggagctggggcgcgaacgcacgattgctatgagcctgccggaattcgagcagtcactgtttatggcagcgcagcccgacaatctgctactggcgaccgcgccgcgctactgtcagtactacaatcaactccaccaactgccgttggttgcgcttcctctcccgtttgacgaaagccagcaaaaaaagctggaagtcccttttaccctgctttggcataaacggaacagccataatccgaagatcgtctggttacgggaaaccattaaaaatctttacgcgtcgatggcataaccgaatcgtatgaaacgcgaccctatttcacaataaaatgtaaaaattttgtaataaacttgtctgaatcgaacttttagccgctttagtctgtccatcattccagtaaatgattactcttgtattcataatggaccattaagcatggagcgaaaaatggcgactcactttgcccgagggattttaacggaaggacatctgatttctgttcgtctcccctcccagtgtcatcaagaagcccgaaacattccccttcatcgtcaaagccgttttctggcgtccagaggtttactcgcagaactgatgttcatgctgtatggcattggcgaattgccggaaattgtcaccctgccgaaaggtaaaccggttttcagcgataaaaatttgccttcgttttctatttcctatgccgggaatatggttggcgtggcgttaacaaccgaaggtgaatgtggcctcgatatggaactacagcgtgcgacgcgcgggtttcatagcccacacgcgcccgataaccacaccttttcaagcaatgaatcgctatggatcagtaaacaaaacgatcctaacgaagcgcgggcgcagctcatcacgctgcgccgaagcgtgctaaaactaaccggtgatgttttgaatgacgatccgcgcgatctgcagctgctgcccattgccggacgcctgaaatgtgctcatgtaaatcatgtagaagcgttatgcgacgcggaagacgtgctggtgtggtccgtggcggtcacgcccacgattgaaaagctcagtgtctgggagttagatggcaaacacggctggaaaagcctgccggatattcacagccgcgccaacaatcctaccagccggatgatgcgttttgcccagctctctaccgtgaaggctttttcgccaaattgatagacaaccacaggagtcatcatgtctgaaaaattgaaggtggttacgttactggggagcctgcgcaaaggctcatttaatggcatggttgcacgtaccctgccgaaaattgctccggcgagcatggaagtcaatgcgttaccttccattgccgacattcccttgtatgacgctgacgtacagcaggaagaaggttttccagcaacggtagaagctctggcggaacagatccgtcaggctgacggtgtggtgattgtcacgccggaatataactactcggttccgggtgggctgaaaaatgccatcgactggctttcccgcctgccggatcaaccgctggccggtaaaccggtgttgattcagaccagctcaatgggcgtgattggcggcgcgcgctgtcagtatcacctgcgccagattctggttttcctcgatgcaatggtgatgaacaagccggaatttatgggcggcgtgattcagaacaaagttgatccgcaaaccggagaagtgattgatcagggtacgctggaccacctgaccgggcaattgaccgcatttggtgagtttattcagcgagttaagatctaaataaaaaacccgccagtaatcatgcatggcgggtttttaatgcgctatcgattttaatgagcgtcgataaatacaatcttcaggataaacatcagcgcaacgatgattacgcacgggctaaggtcacgcagacgcccggtaccaatcttcatcacgcagtaggagataaagcccagcgcaataccttcggtaatcgaaaagctgaacggcatcatcacggcggtaataaacgccggaacagattcagtaagatcctgccagttcacgcgagcaagacttgaggtcatcaacacgccaacgtagatcaacgcgccagctgcagcgtagcctggcaccattcccgccagcggcgacagaaagataaccagcaggaacagcagaccaacaaccactgccgtcagaccggtacgaccgccaaccgatacgccggaagaggactcaatataagccgtaacggaagaagtaccgataaacgaaccggtcacggaagagatactgtcgacatacagcgcctgcttcatgcgcgggaatttacccttctcatccgccaggcctgctttatcggtcacgccaatcagcgtaccggaggagtcaaacaggttgaccagcatgaaagagaaaatcacacctgccagcccgaggttaaacgacccggctaaatctacatggcccacgacagtcattacgctcggcggcgcagaaacgatgccattgtagtggacatcacccagcatccagcccagcagcgttgtcaccacgatggaaaccagcaccgccgcgtgaatgttgcgcgaggccagaatagcgatgatgaagaagccgaggatccccagcagcacgctgtgagaagtcaggttaccgatgctgaccagcgtttccgggttagcgacaatcacacctgcattcttcagtcccatcataccaatgaacagaccgataccgctggtgatgcccacacgcagacttaccggaatgttagcaatcatccagtaacgaacgcggaaaatcgtcagtaacagcagaccaatcgcgccccagaagattgcgcccatcccgacttgccacggcaagcccatagcctgtacaacgacaaaagcgaagaatgcattcaggcccatagcgggtgccagtgcaactggcaggttagcaaacagtcccatcataatactgccgaatgcagcaatcagacaggtagtaacgaagacggcgctggtatccatgccagcaacgccaagaatttgcgggttaacaaaaacgatgtaaaccatcgtcaggaaggtggtaaaaccggcgatcacttcggtccgtgccgtcgtgccatgttcgcgcagtttaaacacgcgttccagcatcccctggccagaagcctgggttgtgtgttgttgactcattatctatttccgaacaaggagggaaaatccgtcgctatcgtataccaaaatgagacaatatggacggctgaagataactttttttcattgtatttgcttatacggcaacgattgcgtcatgcgaattggcatgacgaaaacgttaaactaacgataaaggaaagacatgtcccagatagaagcggtatttttcgactgcgacggtacgctggtcgacagtgaagtcatttgctcccgcgcatatgtaacgatgtttcaggaatttggtattacgctcgatcctgaagaggtattcaaacgtttcaaaggtgtaaaactgtacgaaattatcgatattgtttcccttgaacatggtgttacgttagcgaaaacagaagctgaacacgtttaccgtgcagaagtcgctcggctgttcgattcagaactggaagccatcgaaggggctggagcgctcctgtcagcgatcactgcgccaatgtgtgtggtatctaacggcccaaataacaaaatgcagcattctatgggcaagctgaatatgttgcactacttcccggataaactgttcagcggctacgatattcagcgctggaagccagacccggcgttaatgttccatgcggcaaaagcgatgaatgtaaatgtagaaaactgcattctggttgatgactcagttgccggtgcgcaatctggtatcgacgcaggtatggaagtgttctacttctgcgccgacccgcacaataagccgatcgttcacccgaaagtcaccacctttacccatctttcgcagttaccggaactgtggaaagcgcgtggttgggatattacggcatagttcttcacactcccttcacttaccccgcttaaattggcgctcaaaggtaagtaaagggagtttgatatgtctgtttcacgtcgggtaatacatcacggactttattttgcggttttaggaccgttaattggtgttctgtttcttgtcctctacatattcttcgcaaaagaaccgctggttcttttgcgaagaatacaggtacttccattgtttctcttattgtcgattactacgggagttattcctgcattgttaaccggcgtgatggtcgcctgtctgccggaaaagatcgggtcacagaaaaattatcgttgtctggctggtggcataggtggcgtcgttatcactgagttctcttgtgcagttattgtacatattaagggcatggcttcctcggagttgtatgaaaacattctttctggtgacagtctcgttgtccgcatcattcctgcattgctggcaggtgtggtgatgagcagaatcattacccgtctgcccggattggatatttcatgtcctgaaacagactctttaagttaagcgggatactttatctttgggctactcaaaagcagacaggatgttactatgactcaaaatatcaggccgttaccccaattcaaatatcatcccaagccactggaaacaggcgcatttgaacaggataaaaccgtagagtgcgattgctgtgaacaacagacgtcagtttattactcgggtcccttttattgcgttgatgaagttgaacatctctgtccgtggtgtattgcggacggttctgctgctgaaaagtttgcaggtagttttcaggatgatgccagcatagaaggtgttgaatttgagtatgatgaagaggacgaatttgccggtattaagaacacatatcctgatgaaatgctgaaagagttggttgaacgcacgccaggttatcatggatggcaacaggaattctggcttgcgcattgtggcgatttctgtgcttttatcggctatgtgggctggaatgatataaaagatcgcctcgatgaatttgccaaccttgaagaagattgtgagaatttcggtattagaaattctgatctagctaaatgcctgcaaaagcgtggtgattgtcagggttatctcttccgctgtctccactgcggcaagctgagactgtggggtgatttttcgtagttatttaaataatgagaacaggccggagcgtaattcatacatccggccttatttcttcagcttaaccgagcgctaattctgcggcagcggctttatcagcgattaccatcagcgaaggatgcagctgcaacacggaagctggaacatcttcggtaaccggaccttgcagcacatttttcagtgcctgcgctttacctgcgccactgacaattatcagcaagtttttcgccgccatgatgcttttcggccccatcgtcacgtagctgtcaggcactaacgaaaagtcgccgcccaactcaccatgcgccacaatatcaaccatctctccctggatcgggaactccacggtttgctcatggaaatgggtcgtattcggcaaattgccacaaaaatgaccatctgcacctaatcccagcaccaccaaatccaggccgccttcacgcgccagtttctgatcatgctcgcggtagttatcaatagtgagcttctggatattctcttctttgatccccgcaggggtgaaaaacagattacgcagattggtaatcgttacaccttctccctctttgccgcgaaagggaatttcatcgaaattatagaaatagcagttatcataccagggcttacctttaaccagggtggtgaggtattcatacatgcctttgggcgtgctaccggcggtaattgccaggttaacacgacgcgtcttcgacatataaccaagcagatggtgtgccgcgacacggctcatttcctggtaatcttcggtaatgattaatttcatcttagtgccttattttatttaaataatttctgtacgaaggctgcataggcaggccgccagacatccatttcatggttcaggccgggatattcctggtaatcaaacttaatttttttctgctcaagctcagttttcagcccggcgatatccttgccggttacgacatctttatcaccaacgaccacagtaaaattacgtagttgctggttaatagctgccggatcgttcagccgggccgcgacaccttcatccggtacggttgtcgtggtaacaccactgaatgtggccagccagccaaagctttccagatgattcattccggaaaccagcgcctggtacccgccttgtgaaagccctgccagcgcgcgaccatcggcatctttacggacattaaaacgcttgctaatcagcgggataatatcgttcatcagttcgcgatctgccgctttagcattcagcggataaaagactttacgtctttcctgaggcacgaaatcttcgggaataatgcccttcgcatcggtttcggtatccgggatcaccaccagcatcggtttaattttcccttcagccagcaggttatccatgatttgcgggatacgcccctgatcgatagcggaacgtccggtatcaccaaaaccgtgatagaaatagagcactggcaaaggctcgcccatgccggtgtatcctggcggggtccagacatacatctgacgttcagattgcaatgcgttggagtggtaagttatggcgatcaaatcaccatgcgcaacagaacgcgtatccagataactgcctggcaccagaatcatactggagttaacctggcgctgaggcttagtcattgcggtgcctgtatcaatgctgcgtacaccatcaacattgaaaaaatactcgtacaggttgcctttcaggataggtgtgcgccacgaccagactcctgcttcgtctttggtcatcgggtgaatattgtccggaaccggaacacccaccactacagagacattttttgccccaggggcaaagtagcgaaaggtcacgctgttatcggcattgacctgagtcacatactgtttcaccgggatagtgggtgccgggctggctggcatatccgctgctatggcccactgagcagaaataccgctggcaatagccagcgttaaagcagcaatttttatattcatcgtaatattcctttcattaagttccattaccaccagatttcagcctgggcaccgacagcgaactggtcgtctttattgtcttcgaaggtgaagccatccagttcgttttccagggctttgatatacgtggcgtagaaacgaatttccggacgcgaggtcaacatactggtattgactttaaaggtatggaagcgcgtggttttataaccagactcattaaatttattactattcgcatctttgttttgctgggtgaaatagcccagttcaacacctgtctggttatattggtcccaaatataggccgggcgaacaaccgcacgaatagattcgaaatcagagtgtgcgcctgtttcgtagctataaatatcgttaccgaaggagtaaacaatcgcgttagccacaataaaatgatcgccgatataggcttcgccctgtgaagtcagacgaactgctgttccgccggtgtgatcaccataataacgaccattaaaggtggtaaatggacttgcgccagcataacggccaaagttactggcgatagagttattcgcaaccaggaaggagaattcgttgaagccacctttatcaaatttctgcgttaaagatgtgccgaacatccaggtatctttccagtcataatacccgttattatcctgattatctttttccgatgcgctttcgtttgccgtgacataacgaccactcaccattaaggtcgctttatcccataacgggatatctttatagcgtaaatcaatagtattggtattaatctgctgtttgttttgcaggctgcgatcgtaatcatcgacatcttcgcgaaccagcgcgatatcaattttacccggaccgactttccagttttccagacctacacccgctgcggcatcagtacgctgcgttttccagtccagcatctggatttcaattttcggcgcaccgtgtttacccacccagaaatcagcctctggcgcaaagggcaggaaacctttggtggtaacgtacatatcggagaactgcataaagttctcgccaccggcgttatcgccaaaccagccggtagagtactgctgaccaacgttaccatccatcatcacaacggcatcaacccgtttgccgttttcgttgtagacacgttgttttaactgcaaatcaaaccagccggagtattcgttaccaaagcggcccagagaaccaatcgcccatgatttaggtgaaccatgagaggcggtcccccaaccagaacggtaatagccgttgtaactaaagccaatttcatctttcacaaacttactgaaatctttcagagtcatggaagaataaatcgagcctgtctcactggcatttttctcttcatttttgaccagtacagcatcaggttttgcggcactactggtcgggaacggattggcggcatacccttgatcattcgtacttacgctacgattcaccgtcgctggcgtatattttttcttctcttcatctttatactttttgagttcgctttgcgtttctcttaacgctttttctaataactcaaggcgttgttccaccgttaatgattcagccaatgattgtgcagaaaaggctaacggtgccattaataagacggcagaggtaataagatttcgtctaaacataatatccctttatggtgcaaagaaagaattaacgtatcgcatccagactattctgaatgcgacgataattaaggtgctttattggnnnnnnnnnngcccccgcgttttgatcacttctgcataccatccgaagcttttcttacgcgttcttgtgaggcttccttcgccattatcatcacgatccacataaataaagccgtagcgcttagacatttgtgaatgagatgcactgactaaatcaattggcccccaactggtgtaccccataatatccacaccatcggcaatcgcttcatttacctgtaccaggtgatcgtttaaataggcaattcgataatcgtcctgtatcgaaccatccgcttcaacgctgtcttttgcgcctaatccgttctcgacaataaataacggtttttgataacgatcccaaagcgtatttaacagaacccgtaatccaaccggatcaatttgccacccccactctgaacttttcagatgcggattggggatcatattcagtatgttgccctgcgcatttttattaatgctttcgtcgtgggaaacacaaccagtcatgtaataactaaaagagatgaaatcgacggtatgttttaaatcttctgcgtcactttcagtcatctcaatggtgatattgtggtcgcggaagaaacgctgcatatagccgggatactggccacgcgcctgaacatcaccaaagaacatccagcgccggttctcttccatggcctgcaacatatcctgtggctggcaggtgagggggtaaaccagcccaccgagaagcatattgccgattttcgcttcggggagcaggctatgacaggctttaactgcccgcgcactggcaaccagttgatggtggatagcctgataaacttccgcctcgccactctcttctgccagccccacgcccgtgaatggcgcgtgtaacgacatgttgatttcattaaacgtcagccataacgccactttatgttggtagcgagtaaagaccgtgcgggcgtaatgctcgaagtgatcgatgaccgctcgattagcccaaccgccgtagtttttcaccagcccatatggcatttcgtaatgggataacgttaccagcggcttgatccccgcctgcgccatttcatcaaacagccgatcgtaaaacgctaaccccgcttcattcggttcgacttcgtcgccctgagggaaaattcgcgcccaggcaatggaaatacgcagacaggtgaagcccatctcggcaaataacgcgatatcttccgggtaacggtgataaaaatcgatggcgacatctttgatattctctttccccaggatgcgcggttccatttttcccattacgccatgaggctgtaaatctgaggtcgagatccctttgccatcttcctgccaggcaccttccacctgattggcagctgttgcgccaccccaaagaaatgtttctggaaatgctttcataattaactccttttatcgttagcgaatgatggataacagcggttcacctgcgcttatctgcgccgtgccgtggggtaatacgtccgtaaaatcatcgctattactgattaataccggcgtcgtcagatcaaatccggcctcgcgaatagcagggatatcaaaagaaatcagccgatcgcctgtattgaccttgtcacccacgttgacgtgagcggaaaagaatttgccgtccagttttacggtgtcgataccgacatgaatcaggatctccacaccatcatctgactcaatgccaatggcgtgtaatgtggcgaacaacgaagcaattcgacccgcaaccggagaacgcacttcaccaaccgagggcagaatggcgatacctttacccaacaggccactggcaaacgtggtatcagcgacgtgaatgagcggcacaatctctcccgtcatcggtgaacagataccgccctgctcaggtggtgtaataacctctggtgttttctcttgcggggcaccctgcgctggctgacgtttagcggtgatgaaatgaagcatcaccgtaccgacaaatgcgcaaccgatggcaatgacaccgccaataacgctggcccagacggtgaaatcaattcccgttgacgggatggtttgcatgaaggtgaaaatacttggcaaaccaaaggagtagactttcgtttgcgcgtagccaatgatggtggcccccaaagccccactgatacaggcgataacaaaggggtacttacgcggcaggttgacgccatataccgctggttcggtgataccaaacagactcgtcaacgccgctgatcccgccaccacttttttctgcgcatcgcgttcgcagaggaagacgccgagcgccgccccgacctgcgccataatggcgggcattaacagcgggatcatggtgtcgtagcccagcacggtgaagttattgatacacagcggcaccaggccccagtgcagtccgaacatgacgaagatttgccagaagccgcccattaccgcgcccgcaaatgcaggaaccgcctgataaagccagagataaccggcggcaatcagttcgcttatccaggttgatagcggccccaccagcagaaaggtgacgggtgtgataaccatcagacatagcaatggtgtgaagaaatttttgattgccgacggtaaccacgcattaagtcggcgttccagaatgctgcacaaccaggcagaaaaaataatgggaataaccgatgacgagtaattcaacaatgtgaccggaatacccaggaaatccagccccagcgcatccgctttttgcccgttctcgaaagcagtcagaattaatggatgcactaacgctccaccaatcaccatggcagtaaatggattaccgccgaagcgtttccccgcggtgtatcccaggattatcgggaagaaccaaaacaaggcatcactggcgctgaataaaattaaataagtaccactttgttcggtcgtccactgaaaagtgagcgccagagccagcatacctttcaggatcccggttgccgccatcaaaccgatcagaggcgtaaaaatacctgaaataacataaacaaagcnnnnnnnnnnattacctttatcatcattttccggtgcctgttgcgctttttcgtcaaggcctgccacactgttaaccgccaggaagacatcggccacatggttacctatgaccacctgaaactggccaccgctttccaccaccataataataccgggggtctttttcagtacctctgcttgcgctttgctttcatcctttaacttaaaacgtaatcgcgttgcgcaatgcatcagactcacaatgttatctgcgcccccgactcctgcgactatttttctggctaactccgtcataacttgccctctaccgctttgcggcaaaactcaaaaaaaaacctgaaaaaaacggcctgacgtgaatcaagcaattttttcaggttttgcccgcttagtgcggtaacaatcctttactcagtaataatatttcagtgttctttgtgcacgcgctctatatttatggctaaaaacataatctctgcgggtgagattttacgttgatactgcaaaccaataaaaatggcgatccgctccgcacattgccatgcttgcgggtaattttgttttactgcttgttgtaatgactcatcactatcgttaattgaagcatgtccaagaatacgccaggataaaaacttcagatgcgtaaccagtcgctgataactcaagctttcttcctggtaattaaggctgaactgaaattttattaattgcagcatttcgcgcattaattgcgtgacacctgcaacatcctccatatttccgctcatttgggcactgaccagatgcatggcaataaagcccacttcatctttcggtaactgcacgcccaaccgtttatcaataatggttaacgcttcttcccctagctggaactctttcgggtaaagccgctggatatcccacagcagcgggttgggcagtaacacgttttgctgaaagcgtttaatcgcaaactggcaatggtcagttagcgagatataaatactgtcctgtaattttcccaagcgctcctgcgctaaagagataatacgatcacaggttgccatcacctcaagaggaatatgacttaagagttcgcttaatcgcccgttcagttcatgactgctcaaggcatactctttttctattccacttgagttaattctttcgccagcgcgtttttgaaagccaattcctcgccccatgacgactttttcccgctgttgatcatcaataaccaccacaacattattgttgagaattttggtgatttgcatgttcatagcaaggaccttttttataaacaaaaaaacccgacttcaccagtattctctggttatgtcaggttttgcctgcgaatgcagtaacaatccagtcatttattaatggtttttataacgaacatccaggttcggaaattaatttaattgcgtgcagagaaaatagcaatgcgctattgataaaaatatgaccatgctcgcagttattaactttgtgtaattttaggaatttatagagttatatataacaaatcccaataattaagttattgggatttgtctggtgaattatttgtcgctatcttttcccgccagcagtttatccagctcatcaccgcctacatgacggaaatcctgccccttcacgtagtagaagataaactcacaaatattctggcagcggtcgccaatacgttcgatagaacgcgcgcagaacagcgcagtaagtacgctcggaatggtacgcgaatcttccatcatgtaggtcatcagttgacgaacaataccttcgtattcctgatcgacttttttatcttcacgataaatacgtaccgcttcgtcaatgtccatccgcgcgaacgcgtccagcacgtcgtgcagcatctggatggtatgacggcccagcgactccagacttaccagcaacggctgatgctgctgggagaatttctccagcgcagtacggcagattttgtccgccacgtcgccaatacgctccagctcggcaatggttttactgatcaccataaccagtcgcaggtcgctcgccgtcggctgacgtttggcgataatgcgcacgcaggcttcatcgatcgccacttccatcatgttgacgttcttgtcgccttcgatcacgcgcttcgccagatcgctgtcctggttatgcatcgcggtgattgcatcagaaagctgctgctccaccatgccgcccatggtcatcacctgcgtgcggatactttccagttcggcgttgaactggccggaaatatgtttattaagattgagactgtccataacgcactcctgaatcaaccgtaacgaccggtgatgtagtcttctgtttgtttcttcgctggcttggtgaacagatcgtccgtgttgctgaactcaatcaattcgcccaggtacataaacgccgtgtggtcggaacaacgcgcagcctgctgcatgttgtgggtgacgatcaccacggtgtaatcctgcttcagttcggtgatcagctcttcaatacgcccggtagagatagggtcgagcgccgaacacggttcgtcgagtagcagcacttccgggcgaatggcgataccacgcgcaatacacagacgctgttgctgaccaccagagagagagtaaccgctctggtgcaatttatctttggtttcgttccacaatgcggctttggtcaatgcccactgcacgcgctcgtccatgtcggcacgggagagcttctcaaacagacgaacgccaaaagcgatgttgtcgtagatggacatcggaaacggcgtcggtttctggaacaccatgcccactttcgcacgcagcagggcgatatcctgagagttggtcaggatgttgtcgccatcaagcagaatttcaccttctgcgcgctgctccggatacagttcaaacattttgttgaaggtacgcagcagcgtcgatttaccgcagccggacggcccgataaacgccgttacctggtttttagcgatatccaggttgatgtttttcagggcatggaatttgccgtagtagaagttcaaattacgaacctgaattttactcggggcagtttcaaccatactcattgcaatcttttcctcatcgtacctgatgcttttcgctaatcaggcttaccgtaggccgggtaaggcgttcacgccgcatccggcaaagtgttaaccgtgtttattcttcgcaaaaacaacgcgcgccagaatgttcagcagcaggacgcacagggtaatgatcaataccccggcccaggccagttgttgccattccgcaaacgggctcatcgcaaacttaaagatcgtcaccggcaggttggcgatcggctgcatcatgtccgtgctccagaactggttggagagcgcggtaaacagcagcggcgcggtttcaccggcaatacgggcaatcgccagcaggataccggtcataatcccggacaccgacgctttcagcgtaatcgcggagatcatcttccacttcggtgtacccagcgcataagccgcttcacgcaggctgtccggcaccagtttcagcatgttctcggtggtgcggataacgatcggcacctgcaacagcgccagcgcaattacgcccgcccagccggagaagtgctccatctgtgccaccacgatggtgtagacaaacagaccaaccacaatcgacggcgcggagagcagaatgtcgttaatgaagcgaatcacttctgccagccaggatttacgaccatattccgccagataaatccccgccataatgcccagcggcgtaccgaataccgtggcccacaaaattaacagcccgctacccgccagggcgttcgccagaccaccaccttccgtattgggcggcggcgtcatttcagtgaacagcgccagcgacataccgtcgataccgcgagtgatggtggacattaaaatccagatcagccagaacaggccgaaggccatcgtcgccatcgagagcgtcagcgcaatacggtttttgaggcggcgacgcgcctgcattttgcggcgagattcagccagcgccgcagtggtttgcatttcaaccatagccattagcgtgccccctcattcttagccaggcgcataatcataaacttcgatgcggcgaggacgatgaaggtaatcacaaacaggatcaggcccagttccatcagtgcggcaacgtgcagaccggattccgcttccgcaaattcgttcgccagcgcagaggtgatactgttgcccggcatatacagcgaggcgctgtcgagctggtaggtgttaccgatgataaaggtcaccgccatggtttcaccgagcgcgcggcccagccccagcatgatgccgccgataacaccatttttggtgaacggaagaacgatacgccagataacttcccaggtggtgcagccaataccgtaggccgactctttcatcatcaccggggtttgttcgaacacatcacgcattaccgccgcaatgtacggaataatcatgatggcgaggatcacgcctgccgcgaggataccgataccaaatgcggggccagagaacagcgcgccaacaatcgggatattcgacatgatattgccgaccggctcctgaaagtaaacggcgaacagcggcgcaaagataaacaggccccacatgccgtaaacgatacttggaatggctgccagcagctcaatggcgatacccagcgggcgtttcagccagccaggcgcaagctcagtcaggaacagggcgataccgaaactcaccgggacggcgatcagcagcgcgataaacgaagtcaccaacgtaccgtagatcggcaccagcgccccgtagatatcgttcggtgcatcccactctttggtccataggaaagccagaccaaatttctgaatgctcggccaggaggagatgatcagagagacaataatgccacccaacatcaatagcacaatcagcgccgccagttttaccagcacgctgaaaattatgtcgccctttttacccggtgggttaaaagcaggcttggttgcagccataagttactcttcagttaaacgcgtttacaaagtcattttgtaatgccggatgcggcgtaaaacaccgtacccggcctggagttttattagtacagcggcttaccgctactgtctttaatattggtcttccacgcagcgcgaacctgttcaactacactatccggcaggctggcgtaatccaggtcgttcgcctgtttagccccggttttgtacgcccagtcgaagaatttcagcacttctgtgccttgttctggtttcttctgatctttgtggatcagaatgaacgtggtagaggtaataggccatgcatcttcgcctttctggttggtcagatcctgagcgaaggttttgctccagtctgcaccttttgctgcattagcgaagttttcttcggtcggactaaccggtttaccatcagcggagatcagtttggtgtacgccaggttgttctgcttcgcgtaagcatattcaacataaccaattgcacccggcagacgctgaacgaacgcggcgataccgtcgttacctttaccgcccagaccgatcggccattttacggtagagccagtaccaacgttgtttttccactcttcgttcactttcgccaggtagctggtgaagacgaaggaagtcccggagccatctgcgcggcgtactacagcaatgttttgtgaaggcagtttcagacccggattcagtttggcgatggcttcatcatcccacttcttgattttgcccaggtagatgtcgccgagggttttaccatccagcaccagttcgccagacttcagccctggaatgttaaccgccagcaccacgccgccaatcacggtcgggaactggaacagaccttcctgagccagtttttcgtcagacagcggcgcgtcagaggcaccaaaatcaacggtattagcgataatctgttttacgccaccggaagaaccgataccctggtagttaactttattaccggtttctttctggtaagtgtcagcccatttggcatacaccggcgcagggaaggttgcacctgcacctgtcaggcttgcttctgcaaacacagagaaagcgctcatcgataaggtcgcggcgacaacagttgcgacggtggtacgcataactttcataatgtctcctgggaggattcataaagcattgtttgttggctacgagaagcaaaataggacaaacaggtgacagttatatgtaaggaatatgacatttttatgacagaaaggaattaccaaataacttactgattttaaatgtgaagatgaaaatcccacatgtcatctttttgtcatgatgcatttaaaagtgataaagaaatgggtgagatgacaacgatgtgatgaacaatcgttgtcagacctattagcgcacaatctcaacagttatcgtcgctgttgcagtaaattgccccggggctgggcgagctccagtaaggctcgcaggagcagctgaaaaagttacactacctgatttttcaccatacactgttgatttacccatgtctgttggcaactcaccaccgttcactttgatttccttattatttttgtcgtaaatttttatccccacgttagagtttgaagttacgaccattgaattgtccgtattgggttcggtagcataaaaagacgtactgatatcatcggtattcagtatccctaggttttcacactcaatagtgaccgttttagtaattttatgtgttgttaccgcacttccaacaacagatgaaaaatctgcagctggtatttctttaaaatcaaaataaactggctgtaaattatttatttcgcaactttgcggagctgtaatatcgccccgaatataaacatcagccatcggctgtgagtaatccaccggggtgtcacggctaattgttccatacaatgtcactatctttgtttcaggaataatcaattttcctgcaaatgtcttcttgatataaaaatatactatcgctttagccccactagatatacttaaaggttcaatgcggttgcaattgtactttgtattaccagacgggttgttagcatgatattcaaaaggtgcattcacatacccaaccccaagaatatctatagcaatcccaacatcaaggttcggattaagatcataataattaatattagagtgaaccccagcataagttaatgcctggtttatttttgacgtataatagatataggggaattctcctacgttaccagtatcacaatgacagcgtccaggatatgaggatccattagttacagtggtgttaaatgtcgttccaaccttattttcgttcgcggtaataagatatcccgagaaatcaagcgtactgtgaaatacgccattatcaggggtacagatacctttaggagctgcaagtgctacactacttaacgagagcataaacacagcaaagcaccactgtttgatatacttgttcataaaaatccttttaatgacatgtcacaccctgttcaattaatccgctctcactttctggtgtcgaaagtgaataattgaagatgcattttgttgaggcgttttctccccaggataacgtaacctgtcctttttctggtagaccagaaagataaagttcgccacggtcaccgacaattcctgaatctgccaaacttgcatcttgtatcgcagcaatggctccaaaaggtaccggtttctgatgaatcccctaatgattttggtaaaaatcattaagttaaggtggatacacatcttgtcatatgatcaaatggtttcgcgaaaaatcaataatcagac

SEQ ID NO: 224 - DNA, 24017 bp, Escherichia coli
  source 1..24017: mol_type = genomic DNA
atttatatgtttttgtattgtgtttgttaaggagtttggattgaaaagaaaactgatttgtgttatggctttttgggggcgttgctggctggttgtaatgagagtaataaaaaagaagttgagggttgtattgaaagaggtgtccaatattttatagagattggttcttaccctaaattaagtgatgggcgtgatgctgtgaaagttgctactgaacgttgtaatagaacaataacggctttctgataatggattatacgagctatataataggacagcttcaggttgaggatattattgatgcaattaaaggcgttaataatactaatgtcataaaagattatgtgctgcctgtagtattaccaattatatcttctgtgctgagttactttattgcaactaggttgttttatcggcaggagtaccttaaagcacaaagaagaaaggtaagcgttgtaaataaatgtatttatgactacttttctgcaatgacaacgttgttgcaaattaaagggaattattatggtggggtaagtataagtgaaaatcctatcgagagggctttagcttttcctgttgtggttttttctggtgctcctctatcatcagatttaagtgagttggcctgtatattgagtcaaaagggagtagggaataatagagagacagcaaagactactaactggggggatgcttttgctgttagtgatatagcaagaaggtttaacagcctattggctgcattaaatgttaggaatgattttgatgacacctatagaggaatgattattgaatcaacaggttcacctttgcctacgatgcgttttaaaaatgatgatattgttaatgctataggtagtaataaggcagcttattacattgatattactgagcaaataatgattatgatagatgttttgttgcttgatattaatctgttgctcaaagagttgccattgtatgctgaatcgctgtttgacaaaagagtaatgcaagaagattcagggattcttaaattcaatgatttgcacgaacgttttcctctacttatgaaacctgtaacgccaccttcgattaaactcatgtctgattatttggggtacagtgaagatgagatcttacgacgctatccatacccgttctttaatatgcatgattgtgaatgaatgtgcatatgtcagaagccgtttttattgtcagttatcgtcagtgctggcgcgctcttggagtgttcatgcaactgcattaaaaccgccccacgaagcgggcgggcgaggcggggaaagcactgcgcgctggcggtggtgatgattgtctgagcgcgtcgtgatggcgtttagattgtgcgccggggcgttggtgtgtctgcggggtgttttgtacagtggcgagcgtgtgagggcgtgatgacgggggtgtaaaaaagccgcccgcaggcggcgatgttcagccgttgtcagtgtccagtgagtagtttttaaagcggatgacctcctgaccgagccagccgtttatttcccgaatcctgtcctgtaacgggataagttcattgcggacaaagacctttgccactttctcaatatcgcccagcgacccgacgttttccggcttgccacccatcaactgaaaggggatgcggtgcgcgtccagcaggtcagcggcgctggcttttttgatattaaaaaaatcgtccttcgttgccacttcactgagcgggataattttaatgccgtcggctttcccctgtggggcatagagaaacagatttttaaagttattgcggcctttcgacttaaccatgttttcgcgaagcatttcgatatcgttgcggtcctgcacggcatcggtgacgtacatgatgtatccggcatgtgcgccgttttcgtaatacttgcggcggaacagcgtggccgactcattcagccaggcagagttaagggcgctgagatattccggcaggccgtacagctcctgattaatatcaggctccagcaggtgaaacacggagccgggcgcgaaggctgtcggctcgttgaaggacggcacccaccagtaaacatcctcctccacgccacgacgggtatatttggccggtgaggtttccagtctgatgaccttaccggtggtgctgtaacgcttttccagaaacgcattaccgaacaccagaaaatccagcacaaaacggctgaaatcctgctgggaaagccacgggtgcgggataaacgttgaggccagaatattacgtttgacgtaaatcggtgagctgtgatgcacggcagcacgcaggctttttgccagaccggtaaagctgaccggtggctcataccatctgccgttactgatgcactcgacgtaatccagaatatcacggcggtcgagtaccggcaccggctcaccaaaggtgaatgcctccattttcggggcgctggcagtcattgttttcaccgctggctgcggtgttttcccttttttcttactcatcagtaaaactccagaatggtggatgtcagcggagtgctgataccggcggtgagtggctcatttaacagggcgtgcatggtcgcccaggcgaggtcggcgtggctggcttcctcgctgcggctggcctcataggtggcgctgcgtccgctgctggtcatggtcttgcggatagccataaacgagctggtgatgtcggtggcgctgacgtcatattccagacagccacgacggataacgtcttttgccttgagcaccattgcggttttcatttccggcgtgtagcggatgtcgcgtgcggcgggatagaacgagcgcacgagctggaacacgccgacaccgaggtcggtggcatcaataccgatgtattcgacgttgtatttttcggtgagtttgcggatggattcagcctgggtggcaaagtccatgcctttccactggtgacgctcaagtattctgaatttgccaccggccaccaccggcggtgccagtaccacgcatccggcgctgtcgccacggtgtgacgggtcgtaaccaatccataccgggcgggagccgaacggattggcggcaaacggcgcatagtcttcccattcttccagcgtgtcgaccatgcagcgttgcagctcctcgaacgggaacaccgacgccttgtcgtcaacaaattcacacatgaacaggtttttaaaatcgtcggcgctgttttcgcgtttgagctgctcaatgtcgaacagcgtgcagccacctttcagggcgtcctcaatggtgacaatctgccgccactggccgtctgcacagagaagcccaccggcaagggcgttatgactgacgtcgatttccacgcgttcggcggcgctggcgcgtccccggttaaacagttcacccgaccagaacgggtaggcgtcgtgcgccagcgtggacggggtggagaaataggtcgaacgcaggtgactctgtgaggccatacctgatgccaccttacgcagtacctgaaaattcgggatccagaaaatctcgtcgacgtacaggtcgccgttatggctctgtgcggtgttggagttggtgccgagaaaaatcagttttgcgccgttattgcccaggacaatcgggtcaccggtcaggtcaacgtcaaccagccgggcaaaggcgatgatgtattcacggaacacatacgcctgcgttttactggccgacagaaaaatctggttatggccggttttcagggcgcgcagcagcgcctcgcgggaaaaataaaacgtcgcgccaatctggcgggatttcaggatatcgcggatgcggtgctcaagcccggcgcgataccagtgcaactgatattcgaaagactgctcaaagaaaatctgctccagcttttcgatagcctcgtcgctgaaaaaattctttttcggtttgcgccgcccgcctttgttgcggttagcgatgttcggattaaggtctgcctcgttgccggtctggttgtagcggttgacccgcgccagccgttcaatctggcgtcccagcaggtcaatttccttgaagtcaccgccggttttctgcggtttgatgatgagctgggtcagccgcgcttccagactcatttcgacacggctgatgggggcaacgctgtcccagccgtcgcgctgtttccagctctgcaccgtcgggcgtttcatctgcaacatggcggcaatctgcggcacggaaaacccctgccagtacagcagcgccgcctgacgacgcgggtcgtgtaaaagagtggtgtctgtggtgatggtcatgaatacctcgccgtgatgaatacacggcaaggctactgagtcgcgccccgcgattcgctaaggtgctgttgtgtcagtgataagccatccgggactgatggcggaggatgcgcatcgtcgggaaactgatgccgacatgtgactcctctaatcactattcaggactcctgacaatggcaaaaaaagtctcaaaattctttcgtatcggcgttgagggtgacacctgtgacgggcgtgtcatcagtgcgcaggatattcaggaaatggccgaaacctttgacccgcgtgtctatggttgccgcattaacctggaacatctgcgcggcatcctgcctgacggtatttttaaacgttatggcgatgtggtcgaactgaaggccgaaaagattgacgatgattcggcgctgaaaggcaaatgggcgctgtttgcgaaaatcaccccgaccgatgaccttatcgcgatgaacaaggccgcgcagaaggtctacacctcaatggaaattcagccgaactttgccaacaccggcaaatgttatctggtgggtctggccgtcaccgatgacccggcaagcctcggcacggaatacctggaattctgccgcacggcaaaacacaaccccctgaaccgcttcaaattaagccctgaaaacctgatttcagtggcaacgcctgttgagctggaatttgaagacctgcctgaaaccgtgttcaccgccctgaccgaaaaggtgaaatccatttttggccgcaaacaggccagcgatgacgcccgtctgaatgacgtgcatgaagcggtgaccgctgttgctgaacatgtgcaggaaaaactgagcgccactgagcagcgccttgctgagatggaaaccgccttttccgcacttaagcaggaggtgactgacagggcggatgaaaccagccaggcattcacccgcctgaaaaacagtctcgaccacaccgaaagtctgacccagcagcgccgcagcaaggccaccggtggtggcggtgacgccctgatgacgaactgctgaccggcgtcagtcagtccgggaaaaccttcacgattaacccttaatttcaggaaaaactatgcgccaggaaacccgctttaaatttaatgcttacctgtcccgtgttgccgaactgaacggcatcgacgccggtgatgtgtcgaaaaaattcaccgttgaaccgtcggtcacccagaccctgatgaacaccatgcaggagtcctctgactttctgacccgcatcaacattgtgccggtcagcgaaatgaaaggggaaaaaattggcatcggtgtcaccggctccatcgccagcaccaccgacaccgccggtggcaccgagcgtcagccgaaggacttctcgaagctggcgtctaacaagtacgaatgcgaccagattaacttcgatttttatatccgctacaaaacgctggacctgtgggcgcgttatcaggatttccagctccgtatccgtaacgccattatcaaacgccagtcccttgatttcatcatggccggttttaacggcgtgaagcgtgcagaaacctctgaccgcagcagcaatccgatgctacaggatgtggcggtcggctggctgcagaaataccgcaatgaagcaccggcgcgcgtgatgagcaaggtcactgacgaggaagggcacaccacctctgaggttatccgcgtgggtaagggcggtgattatgccagccttgacgcactggtgatggatgcgaccaacaacctgattgagccgtggtatcaggaagaccctgaccttgtggtgattgtgggacgtcagctactggcggacaagtattttcccatcgtcaacaaggagcaggacaacagcgaaatgctggccgctgacgtcatcatcagccagaaacgcatcggcaacctgccagcggtacgcgtcccgtacttcccggcggatgcgatgctcatcacaaagctggaaaacctgtccatctactacatggatgacagccatcgccgcgtgattgaggaaaacccgaaactcgaccgcgtggagaactacgagtcaatgaacattgattacgtggtggaggactacgccgccggttgtctggtggaaaaaattaaggtcggtgatttctccacaccggataaagcgaacgcagagccgggagcgtaaccgatgacgagtcccgcacagcgtcacatgatgcgggtctcggcagcgatgaccgcgcagcgggaagccgccccgttgcgacatgcaactgtctatgagcagatgctggtcaagctggccgcagaccagcgcacactgaaagcgatttattcaaaagagctgaaggccgcgaaaaaacgcgaactgctgccgttctggttgccgtgggtgaacggcgtgctggagcagggcaaaggtgcacaggatgacattctgatgacggtcatgctgtggcgtctggataccggcgatattgccggtgcgctggagattgcccgttatgccctgaagtacggtctgaccatgccgggtaaacaccgccgcaccccgccgtacatgttcaccgaggaggtggcgctcgcggccatgcgtgctcacgttgccggtgagtctgtggatacccgcctgctgacggacacccttgaactgactgccacggcagacatgcctgatgaagtgcgcgcaaagctgcacaaaatcactggtctgtttctgcgtgacactggtgatgccgcaggtgcgctggcgcacctgcaacgtgcgacacagctcgactgtcaggcaggcgtcaaaaaagagattgaacgactggagcgggaactgaaaccgaagccggagccacagccaaaagcggccacccgcgccccgcgtaagacccggagcgtggcaccggcaaaacgtggacgcccgaaaaagaaagccagttaacaaccgaatgcgccccgcgccagggcggcacgccggtcagtgagggtgaatcacctgacactgcaccggcgtccaccgcccgacttttcagaggtagtcatgatgacgctgattattccgcgaaaggaggctcccgtgtccggtgagggtacggtggtcatcccgcaaccggcaggcgacgagccggtgattaaaaacacgttcttttttcccgatatcgacccgaagcgcgtccgggaacgtatgcgccttgagcagaccgtcgcccccgcccgtctgcgtgaggccatcaagtcaggcatggcggagacgaatgcggagctgtacgagtaccgcgaacagaaaattgctgccggttttacgcgtctggcggacgtcccggcggacgatatcgacggtgaaagcatcaaggttttttactacgagcgcgccgtgtgtgcgatggcgaccgcatcgctttatgagcgttatcgcggcgtggatgccagtgcgaaaggcgacaagaaggctgacagcattgacagcaccattgatgagctgtggcgggatatgcgctgggcggtggcgcgtatccaggacaagccgcgctgcatcgtgagtcaaatctgatggagacctttgcgctacagggcgacacgcttgacgccatttgtgtccggtattacgggcgcactgagggcgtggtcgaggccgtgctcgccgcaaatccgggactggctgaactgggcgcggtgctgccgcacggcaccgccgtcgaactgcctgacgttcagaccgcgcccgtggctgaaactgtcaatctgtgggagtaacgcatgacagcagaagaaaaaagcgtcctgtcgcttttcatgattggggtgctgattgttgtcggcaaggtgcttgccggtggtgaacctatcaccccgcgtctgtttatcgggcgcatgttgctcggtggttttgtctcgatggttgccggtgttgttctggtgcagtttcctgacctgtcactgcctgcggtgtgcggcatcggctccatgctgggcatcgccggttatcaggtgattgagattgccattcagcgccgttttaagggcagggggaaaccgtaatgccggtaattaacacgcatcagaatatcgccgcctttctcgacatgctggccgtgtccgaagggacggcgaatcatccgctgacgaaaaaccggggctatgacgtgatagtcaccggactggacggaaagccggaaattttcaccgactacagtgaccacccgttcgcacatggccgaccggcgaaggtgtttaaccgtcgcggtgaaaaatccacggcctccggtcgctatcagcagctttacctgttctggccgcattaccgcaaacagcttgccctgccggatttcagtccgttgtcacaggacagactcgccattcagttgatccgcgaacgcggagcactggatgacatccgggcgggacgcattgagcgcgccatttcacgctgtcgcaatatctgggcgtccctgccgggtgccggttacggtcagcgtgagcattcactggaaaaactggtcaccgtctggcgtaccgctggcggcgtaccggcttaaacggagtaaacaccatgaagaaattatccctttcactgatgctgaacgtgtcgctggcgctgatgctggcactgtccctgatttacccgcagagcgtggccgtcaattttgtcgctgcctgggcgattctggcgacggttatctgtgtggttgccggtggtgtcggcgtgtatgccactgagtatgtgctggaacgctacgggcgggagctgccgccggaatcgctggccgtgaagattgtcacgtcgctgtttttgcagccggtgccgtggcgcagacgggcggcggctctggtggtgatggtggcgacgtttatctcgctggttgccgccgggtggatttttactgcgctgatttacctcgtggcgtcggtgttcttccggctgatacgtacggcctgccatcagcgttttgaggggcgggaaccatgtcaaagctgatgattgtgctggttgtgttgttatcactggcggtagcggcgctgtttctggtgaagcatgaaaacgccagcctgcgcgcctcgctggacagggcgaacaacgtcgccagcgagcaacaggcgaccatcaccatgctgaaaaatcagcttcatgttgcgctcaccagggcagacaaaaacgagcaggcgcaggtggcactgcgtcaggaactggaaaacgccgcgaagcgtgaagctcagcgcgagaaaaccatcacgagattactcaatgaaaacgaagatttccgccgctggtatggcgctgacctgcctgatgctgtgcgccggttgcaccagcgccccgcctgcaccgacgccagtgattgtccacaacgcctgcccgaaagtgagtctttgcccgatgccgggcagtgacccgcagacgaacggcgatttaagtgccgatatccggcagcttgagaacgcgctggcacgctgtgccagccaggtaaaaatgattaaacactgtcaggacgaaaacgatgctcaaacccgacagcctgcgcagggcgctgactgatgccgtcacggtgctgaaaactaaccccgatatgcttcggatattcgtggataacgggagtattgcctccacgctggcgacgtcgctgtcattcgaaaagcgttacacgctcaatgtcattgtgaccgattttaccggtgattttgacctgctcatcgtgccggtgctggcgtggctgcgggaaaatcagcccgacatcatgaccaccgacgaaggccagaaaaaaggcttcacgttttatgcagacatcaacaatgacagcagctttgatatcagtatcagcctgatgctgaccgaacgcacgctggtcagtgaggtgggcggcgcgctgcatgtgaagaatatcccggaacccccgccgccggagccggtcacccgcccgatggagctttatatcaatggcgaactggtgagtaagtgggatgaatgagtttaagcgttttgaagaccggctgaccggactgattgagtcgctgtcaccgtctgggcgtcggcgactgagtgccgaactggcgaaacgtctgcggcagagtcagcagcgtcgggtgatggcacagaaagccccggacggcacaccctacgcgccacgccagcagcagagcgtcagaaaaaagaccggtcgcgttaagcgaaaaatgtttgcgaaacttattaccagtcgttttttgcatatccgtgccagctcggagcaggcatcaatggaattttacggcgggaagtcgccgaaaatcgccagtgtgcatcagtttggtctgtcggaagaaaaccggaaagacggtaagaaaattgattatccggcgcgtcccctgctcggctttaccggtgaggatgtgcagatgattgaagagattatcctggctcaccttgagcgttagttttatccaggcagaggctgatgcgcaattaaacattgagcggccatgctggtcgctcaatgtttagaggtttatgagtgatttttatttgatgctttgtattctaaaaccttcttattggcgtaaaagaattttgtatatgacaggaatataaccagacctgaagtgaaatagacgagggatagtattaataatgcttttttgtgactgttattatctttaatctcctggcttaaccattcggagtcctcctcgtttagctgtaagagcttattgcaggcgatctcaggaagtgtgtcttttataaatacgttttgcagtttcttgcaatcggcaaggctataagttttattaaattcaactgctttatttttgaaggataaaagaactttgtcactataaacatagtacatcatgtttttatatggtatgcctatggcatcccttactataacggattgtttgttgtgtatgtaacatgcgaggagaatgtaaaaaatactggtcagaattacaattattgttttaattatgtgtggtggttttgttatgtcaccccagatgcgagtaaggaaaaaatacgatgtttttagttttccatcaatcagtccctgctgtatcattctcacattttcaatgcctgatacattgattccgttaattattttaaatagttgaatgtcgcgccactcgcggtcaagtctttttaattttttgtctgaatatccaaagttgaaataatgtgcaataagcctcataaggttacttttaccaaagctaaaaaatgctaatactgcaaagctacaaaggaaaaaaacgattagcccccacacattagtcacattatagctgaccattacgctctccttgaatgttgtctggtagttctacaaatgaatccagatagcataacttttatatattgtgcaatctcacatgcatgaacactctcgcaaatattcaggaactcgcgcgcgcactgcgcaacatgattcgcaccggcattatcgtcgaaaccgaccttaacgccggtcgctgccgcgtgcagaccggcggcatgtgcaccgactggcttcagtggctgacccatcgcgccggtcgttcgcgcacatggtgggcaccttccgtgggagaacaggtgctgattctgtccgtgggcggtgaactcgacacggcattcgttctgccggggatttattccggcgataaccccgcgccgtctgcgtcggcggatgccctgcatatccgtttccctgacggggcggtgattgagtatgaacccgaaaccagtgcacttacggtaagcggaattaaaacggccagcgtgacggcttctgattctgttactgccacggtgccggtggtcatggtgaaagcatcaacccgcgtcaccctggacacaccggaggtggtctgcaccaacaggctgattaccggcacgctggaagtgcagaagggcgggacgatgcgcggcaacattgaacacaccggcggtgaactctcatcaaacggtaaggtactgcatacccataaacaccccggcgacagtggcggcacaacagggggacctctatgacagcgcgttatctcggaatgaatcgcagtgatggcctgactgtcactgaccttgagcatatcagccagagtatcggcgatatcctgcgcacaccggtcggctcacgggtgatgcgtcgtgattacggctcgttgctggcgtcaatgattgaccagccgcagaccccggcgcttgagttgcagattaaagtcgcctgttacatggcagtgctgaaatgggaaccccgcgtcaccctgtcatccgtcaccacggcgcgcagttttgacgggcgaatgacggtcacgttaaccggcctgcacaacgacaccggccagccactttcgttaaccatccctgtgagttgaaaccatgccgattatcgacctgaaccagctacccgcaccggatgtggtcgaggagctggactttgaaaccattcnnnnnnnnnnacgcaaggcgacactgatttccctttacccggaagaccagcaggaggcggtcgcccgtgccctgatgctggaatccgagcctctcgtcaaactgctggaggaaaatgcttatcgtgagcttatctggcgtcagcgtgtgaatgaggccgcacgggcggtaatgctggcctgtgccgccggtaatgaccttgatgtgattggtgccaattacaacaccacgcgcctgactatcaccccggcagatgattcgaccattccgccgacaccggcagtgatggaatctgacaccgattatcgtctgcgtattcagcaggcgtttgaaggtttaagcgtcgccgggtcggtgggggcttatcagtatcatggtcgcagtgccgacgggcgtgtcgcggatatttctgtcaccagtccgtctcctgcctgtgtcaccatctctgtgctgtcacgtgaaaataacggcgtcgcatccgaagacctgctggctgtggtgcgtaacgcccttaatggcgaggacgtcaggccggtggccgaccgcgtgaccgtgcagtctgccgccatcgttgaataccagataaacgccacgctttacctttaccctggtcccgaaagcgaacccatccgcgctgccgctgtgaaaaagctggaagcgtatatcacggcacagcaccggctggggcgcgacatccgtctgtctgccatttatgccgctttgcatgtggaaggcgtgcagcgtgtcgaactggctgcaccactggctgacatcgtgctcaacagtacgcaggcgtctttctgtaccgaataccgcgtcgtgaccggaggctcggatgagtgattcgcgcctgctgccgaccggctcatcaccgcttgaagttgccgccgcaaaagcctgtgcggaaattgaaaaaacgccggtcaggattcgtgagctgtggaacccggacacctgcccggcaaatctgctgccgtggctggcgtgggcgttttcggtcgacaggtgggatgaaaagtggccggaagcgacaaaacgcgccgttatccgcgatgcctatttcatccactgtcataaaggcactatcggcgcaatccggcgtgtggtggagccgctcggctatctcatcaacgtgacggagtggtgggaaaacagtgacccgcccggcaccttccgccttgatattggtgtactggaaagcggtatcacagaggcaatgtatcaggaaatggaacggctgattgctgatgccaaacctgcaagccgtcaccttattggtctgaacattacccgggacattcccggctacctgttcgccggtggtgtggcttatgacggcgatgtaattacggtttaccccggataagtgaggaataatgagcacaaaattcagaaccgttatcaccactgctggtgcagcaaagctggcagcggcaaccgcgccgggagggcggaaggtcaacattaccacgatggccgtcggggatggcggtggtaaattgcctgtcccggatgccggacagaccgggcttatccacgaagtctggcgacatgcgctgaacaaaatcagccaggacaaacgaaacagtaattatattatcgcagagctggttattccgccggaggtgggcggtttctggatgcgtgagcttggcctgtacgatgatgctggaacgttaattgccgtggcgaacatggctgaaagttataagccagctcttgccgaaggctcagggcgttcgcagacctgccgcatggtcatcatcgtcagcagtgtggcctcagtggcgctgaccattgacaccacaacggtgatggcaacgcaggattacgttgatgacaaaattgcagaacatgaacagtcacgacgtcacccggacgcctcgctgaccgccaaaggttttactcagttaagcagtgcgaccaacagcacgtctgaaacactcgccgcaacaccaaaagcggtaaaagcagcatatgaccttgctaacgggaaatacactgcacaggacgccaccacagcgcgaaaaggccttgtccagctcagtagtgccaccaacagcacgtctgaaacgctcgccgcaacaccaaaagccgttaagacggtaatggatgaaacgaacaagaaagcgccattaaacagccctgcactgaccggaacgccaacgacgccaactgcgcgacagggaacgaataatactcagatcgcaaacacggctttcgttatggccgcgattgccgcccttgtagactcgtcgcctgacgcactgaatacgctgaacgagctggcggcggcgctgggcaatgacccgaattttgctaccaccatgactaatgcgcttgcgggtaagcaaccgaaagatgccactttgacggcgctggcggggcttgctactgcggcagacaggtttccgtattttacggggaatgatgttgccagcctggcgaccctgacaaaagtcgggcgggatattctggctaaatcgaccgttgccgccgttatcgaatatctcggtttacaggaaacggtaaaccgagccgggaacgccgtgcaaaaaaatggcgataccttgtccggcgggcttacttttgaaaacgactcaatccttgcctggattcgaaatactgactgggcaaagattggatttaaaaatgatgccgacagcgatactgattcatatatgtggtttgaaacaggtgacaacggcaatgaatatttcaaatggagaagtcgccagagcaccacaacaaaagacctgatgaatcttaaatgggatgctctgtatgttcttgttaaagcccttttcagcagtgaagtaaaaatatctacagtcaatgcgctgaggatatttaattcatcttttggtgctatttttcgccgttctgaagaaaacctgtatatcattcctacacgagaaaatgagggtgaaaatggagatattgggccattaaggccattcggcatcaacttaagaacaggagttgtgtctgttggtaatggtgccaggattgatggcgggctggcacttggcacgaataacgcgttgggtgggaactctattgttcttggtgataacgacaccggatttaaacaaaatggcgatggtaatctggatgtttatgctaataacgtccatgttatgcgctttgtttccggaagcattcaaagtaataagaccataaatattacggggcgtgttaatccctcggattacggtaactttgattcccgctatgtgagagatatcagacttggcacacgtgttgtccagaccatgcagaaaggggtgatgtatgagaaagcagggcacgtaattaccgggcttggtattgtcggtgaagtcgatggtgatgaccccgcagtattcaggccaatacaaaaatacatcaatggcacatggtataacgtcgcacaggtgtaatttatgcagcatttaaaaaatattactgcgggtaatccaaaaactgttgcccaatatcaactgacaaaaaattttgatgttatctggttatggtccgaagagggaaaaaactggtatgaggaagtaagtaattttcaggaagacacgataaagattgtttacgacgagaataatataattgtcggcatcaccagagatgcttcaacgcttaaccctgaaggtttcagcgttgtcgaggttcctgatattacctccaaccgacgtgctgatgactcaggtaaatggatgtttaaggatggtgccgtgattaagcggatttatacggcagatgaacaggagcaacaggcagaatcacaaaaagcagctttactttccgaagttgaatccgtgattttgccgctggaacgcgctgtcaagctgaatatggcgacggatgaggaacgcagccgactggaagcatgggaacgctacagcgttctggtcagtcgtgtggatcctgcaaatcccgaatggccggaaatgccgcaataagttgtatgatctctggtgtgagcttacatatctatagcacagagtaaagcctaatctgacagaccgctctgtgtctggagtagattttagtaaagcattattttattagtgcaaattctaatcaatacattttatgtatatgatatcctgcggactttaatgacttggtttaggctaaccagataacactgaaggaatatttttgataattaaggtgcggtatgtttactaagcgacgattaaaaaatattaactgggaggcaagttcagtgattcttgctatggttctctttgttggaaatatattttatacaaatcaccgtgatgatataagcatggaggctgagagggacagtatcagaacaatgtttgcatatgaaatcgctaataaccatcgcgctctcacttttcttgataaaacgagacatattggctttgacgaaaattcggagcattttgttggcgagccttttgccattaatgtcaaatcattaggagggcctcgcttacaggttgcattaaaccagactgataaagtgtttaaagcctacttcagtgaattaagtaaacttgataaagaggatgttactcttcttatggactattaccatgagcaaagcatcctgctggagtgtgtaaaatctacgttacagaagatgaaaagtaataatgatattaaagttgatattgatggttacttattagaagaacacttcatgaatgagtttaatctttctaatattttgcttaaacgctatagccatttgttgtcacaacacctcaaaaaacctgaaacaaaagatttacataattgatgatctgctaatggttattcatgggataactatgttttatatgtaatccaactcagatgaattattgattctggataataaccgcagagcggcatataccctgacaggcaaatgtccgcttcttgctcaaagcagactgtcatatttgataacttttgggttatgtaaattgtcagtcggaaaatgagtgtgtacaaatcaggacaggcgggcgaattgcccgctttttctttatctgttgtttcatccactgaccagccaggttaaatagcgtctcatgcactacccaacggaaaatagttgcacccattaaccacggagttaaacggatgagtgactatcatcacggcgtgcaggtgctggaaattaacgacggcacccgcgtcatttccaccgtatccacggccattgtcggcatggtctgcacggccagcgatgcggatgcggaaaccttccccctcaataaaccggtgctgattaccaatgtgcagagcgcaattgcaaaggccggtaaaaaaggcacgctggcggcatcgttgcaggccatcgctgaccagtcaaaaccggtcaccgttgttgtgcgcgtggaagacggcaccggcgacgacgaagaaacgaaactcgcgcagactgtttccaatatcatcggcaccaccgacgaaaacggtcagtacaccggactgaaagccctgctggcggcggagtcggttaccggtgttaaaccgcgtattctcggtgtgccgggactggacaccaaagaggtggctgttgcactggcatccgtctgtcagaagctgcgcgctttcgggtatatcagcgcatggggctgtaaaaccatttccgaggtgaaagcctaccgccagaatttcagccagcgtgagctgatggtcatctggccggatttcctcgcatgggatacggtcgccagtaccaccgccaccgcgtatgccaccgcccgtgcgctgggcctgcgcgctaaaatcgaccaggagcagggctggcataaaacgctgtccaacgtcggggtaaacggtgttaccggcatcagtgcctctgtattctgggatttgcaggagtccggcaccgatgctgacctgttgaacgagtcaggtgtcacaacgctgattcgccgtgacggtttccgcttctggggtaaccgtacctgctctgatgacccgctgttcctctttgaaaactacacccgcaccgcgcaggtgctggccgacacgatggctgaggcgcacatgtgggcggtggacaagcccatcactgcaacgctgattcgcgacatcgttgacggcatcaatgccaaattccgtgagctgaaaacaaacggctatatcgtggatgcgacctgctggttcagcgaagaatccaacgatgcggaaaccctcaaggccggaaaattgtatatcgactacgactatacaccggtgcctcctctcgaaaacctgaccctgcgccagcgtattaccgataaatacctggcaaatctggtcaccttggttaacagcaattaaggagcctgaccgatggcaatgccgcgcaaactcaagttaatgaacgtctttctgaacggctacagctatcagggcgtcgcgaagtccgtcacgctgccaaaactgacccgtaagctcgaaaactatcgaggtgcggggatgaacggcagcgcaccggtagacctcggccttgatgacgatgcgctgtcaatggagtggtcgctcggtggcttcccggattcggttatctgggagctttacgccgcaaccggtgtggatgccgtaccgattcgttttgcaggctcttaccagcgcgacgataccggcgaaacggtagccgtcgaggtggtcatgcgtggacgtcagaaagaaatcgacaccggcgagggcaagcagggagaagacaccgagtcgaaaatctccgtggtctgcacctatttccggctgacgatggacggtaaggagctggtcgaaatcgacaccatcaacatgattgagaaggtgaacggcgtcgaccggctggagcaacaccgccgcaatatcggcctgtgattttcatccggtcagcctggctgaccggttaaccacgattcagaagtgagaaaaccatgaacaaagaaaacgtcattaccctggacaatccggtcaaacgtggtgagcaggttatcgaacaggtcacgctgatgaaacccagtgccgggacgctgcgcggtgtcagtctggcagcggtcgcgaactccgaagtcgatgcactgattaaggtgctgccgcgcatgacggcaccgatgctgaccgagcaggaagtcgccgcgctggaactgcctgaccttgtggcgctggccggtaaggtggtcggttttttgtcgccgaactcggtgcagtaacgttcccgaaaaatctgtcggtcgatgacctgatggcggatgtggcagtgatatttcactggccgccatcagaactgtatcccatgagcctgaccgaactcatcacatggcgcgaaaaggcgctccggcgaagcggaaacacgaatgagtaacaatgtaaaattacaggtattgctcagggctgttgaccaggcatcccgcccgtttaaatccatccgtacagcgagtaagtcgctgtcgggggatatccgggaaacacaaaaatcactgcgcgagctgaacggtcacgcatcccgtattgagggattccgcaagaccagtgcacagctcgccgtgactggtcatgcgcttgaaaaggcacggcaggaagccgaagcccttgccacacagtttaaaaacaccgaacgtccgacccgtgctcaggcgaaagtgctggaatcagcaaagcgagcggcggaagacttacaggcgaaatataaccgcctgacggattccgttaaacgccagcagcgggaactggccgctgtgggaattaatacccgcaatcttgcacatgatgagcaggggctgaaaaaccgtatcagtgaaaccaccgcacagcttaaccgtcagcgcgacgcactggcgcgtgtcagtgcacaacagtcaaaacttaacgcagtcaaacagcgttatcaggccggaaaagaactggccggaaatatggcctcagtgggcgctgccggtgtggggattgcggcggcgggaacgatggccggtgttaagctgctgatgccaggttatgagtttgcgcagaaaaactcagaattgcaggccgtgctcggtgtggcaaaagactccgccgaaatggctgcactacgcaagcaggcgcgtcagctcggcgacaataccgcagcctcggcagatgatgcagccggtgcgcagattattattgcgaaagccggtggggatgttgatgccattcaggcggcaacgccggtcacgctgaatatggcactggcgaatcagcggtcgatggaagaaaacgcgcaactgttgctggggactaaggcatcctttcaactgtcaaatgatgatgtcagccatgtgggcgacgtgttgtcggcaacgatgaataagtcggcggctgattttcagggactcagtgatgcactgacttacctcgggccggttgcgaggacggcaggtgtaagtcttgaacaggcagcggccatgacaggtgtgctgcatgacaataacatcagggggtcaatggcgggtacgggtagcagtgccgttgtcacccgattacaggcaccgactggaaaagcatgggatgcactcaaagagcttggcgttaaaacctcggacaaaaagggaaatatgcgtccgttgttcaccattctgaaagagattcaggccagctttgataaacacaagctgggaacgtctcagaagggggaataccttaaaaccatttttggtgaggaagccctgaaatcagcgaacgttttactggcagcggcagcaagcggaaaactggatacgctgaccgccacgctgaaagcctcggacggtaaaacggaagagctggttaaaatcatgcaggataacctcggcggtgactttaaggagtttcagtccgcttatgaggcggtggggactgacctgtttgaccagcaggaaggcgcgctgcgtaagctcacgcagacggccacaaagtatgtgttaaaactcgacggctggatccagaaaaacaaatcactggcatcaaccatcggcctcattgtcggtggtgcactggcgctgattggtgtcatcggtgccattggtcttgtagcctggccggttatcaccggcatcaatgccattatcgcggcagcaggcgcaatgggggcaatcttcacgacggttggcagtgctgttatgacggccatcggggcgattagctggccggttgtggccgtggtggctgcaattgtcgccggggcgttgcttatccgtaaatactgggagcctgtcagcgcattctttggcggtgtggtggaagggctgaaagcggcatttgcgccggtgggagaactgttcacgccactgaagccggtgtttgactggctgggcgaaaagttacaggccgcgtggcagtggtttaaaaacctgattgccccggtcaaagccacacaggacaccctgaaccgttgccgtgacacgggcgtcatgttcgggcaggcactggctgacgcgctgatgctgccgcttaatgcgttcaacaaactgcgcagcggtattgactgggtactggaaaaactcggtgttatcaacaaagagtcagacacacttgaccagaccgcagccagaactcatgccgccacgtatggcaccggtggttatattccggcgaccagctcttatgcaggctatcaggcttatcagccggttacggcaccggctggccgctcttatgtggaccagagtaaaaacgaatatcacatcaacctgacgggcggtactgcgccgggaacacagcttgaccgccagttacaggatgcgctcgaaaaatacgagcgggataaacgtgcgcgcgcccgtgccagcatgatgcatgacggttaaggaggtgacgaaaaatgatgctcgcgttaggtatgtttgtttttatgcgccagacgctgccacaccagaccatgcagcgtgaatcagattatcgctggccgtcaaattcccgtatcggtaaacgggacgcttttcagtttctcggtgtgggtgaggaaaacatcacgcttgccggtgtgctttatcccgaactgaccggcggcaagctgacgatgaccacgctcaggctgatggcagaggaggggcgggcgtggccgttgctggatggcaccggcatgatttacggcatgtatgtcatcagcagggtgagtgaaacagggagtattttctttgcagacggcacaccccggaaaattgattttacgctgtcactcacccgcgttgatgaatcactggccgcgctgtatggcgatatcggtaaacaggcggaatcgctcatcggtaaggctggcagtatggcgaccagattcacggggatgacgggggcgggataatgttggatgcgctgacatttgatgcaggcagtacgctgacgccggattacatgctgatgctcgacagcagggatattaccggcaatatcagcgaccgtctgatgagcatgaccctgacggataaccggggctttgaggctgaccagcttgatattgaactgaacgatgccgacgggcaggtcgggctgccggttcgtggcgctgtcctgacggtgtatatcggctggaaaggttttgccctggtatgcaaagggaaatttaccgttgatgaggttgaacaccggggcgcgccggatgtggttaccatccgcgcccggagtgcagattttcgcgggacgctcaattcccgccgtgaaggctcctggcatgacaccacgctcggtgcgattgttgaggcgatagcctcccgtaacaggctggaagccagagtcgctccgtcactggccggaataaaaattccgcacatcgaccagtcgcaggagtctgatgcgaaattcctgactcgtcttgcagagcgcaacggcggtgaggtgtcggtaaaaatgggaaaactgttgtttctcaaagcggggcagggggtgacggcaagcggtaaaaaaatcccgcagattaccatcacccgcagcgacggcgaccgtcatcattttgcgattgctgaccgtggagcctataccggcgtaacggcaaagtggcttcacaccaaagacccgaagccgcaaaagcagaaggtaaaactgaaacgcaaaaagaaagaaaaacacctgcgcgcactggagcacccgaaagcgaaaccggtcacgcagaagaaagcgcctaaagtaccggaagcgcgcgaaggtgaatacatggccggtgaggctgacaacgtttttgcactgaccacggtatatgccacgaaagcgcaggccatgcgcgccgctcaggcgaagtgggataaactgcaacggggcgtcgcggagttttccatcagcctggctaccggtcgggcagatatttacacggaaacaccggttaaagtgtcaggctttaagcgcgtcatagacgagcaggactggacaatcactaaggtgacacattttctgaataatagcggcttcacgacgtccctggagcttgaggtcaggctttctgatgtggagtacgaaacagaagatgatgag

SEQ ID NO: 225 - DNA, 23407 bp, Escherichia coli
  source 1..23407: mol_type = genomic DNA
tctgattattgatttttcgcgaaaccatttgatcatatgacaagatgtgtatccaccttaacttaatgatttttaccaaaatcattaggggattcatcagagctttgcctttatttcaccggtattgttactgttgccgttagggtatgaagtcgcgctgggcggctttattatgtgcggcgtgctgttctgcctggtttcttttatcgtgaagaaagcggggaccggctggctggacgtgctgtttccacctgcggcaatgggcgcaatcgttgccgtcatcggtctggagctggcgggcgtagctgccggtatggcgggtttactcccggctgaagggcaaacgccagactccaaaaccatcatcatctctattaccaccctggcggtcacggttttaggttccgtgctgtttcgtggtttcctggcaattatcccgattttaattggcgtgctggtggggtacgcgctctctttcgcaatgggaattgtcgataccacgccgattattaatgctcactggtttgcgctgccaaccctctatacgccgcgcttcgagtggtttgccattctgactattctgccagcggcgttagtggttattgccgaacacgtagggcacctggtagtaacggctaatatcgtcaaaaaagatctgctgcgcgatccaggtctgcaccgttcgatgtttgctaatggcttgtcgaccgtgatttccggcttctttggctctacgccaaataccacttacggagaaaacattggcgtgatggcgatcacccgtgtttacagtacctgggttatcggcggggcggcgattttcgctatcctgctttcctgcgtcggtaaactggctgccgctatccagatgatcccattgccggtgatgggcggcgtttcgctgctgctttatggtgtcatcggtgcttccggtattcgtgttttgatcgaatcgaaagtggattacaacaaagcacagaacctgatcctgacttccgtgattttgatcatcggcgtcagtggcgcgaaggtaaacatcggcgcggcggagttaaaaggtatggcgctggcgaccatcgtcggtatcggcttaagtttgattttcaaactgatcagtgtgctgcgccctgaagaagtggtgctggacgcagaagacgcggatataacagacaaataatgtaccgaccgggcagtgttgctgcccggttcaaacatcatgggattctgtggtaaacttctcgcgattttgtgaaatcctggttgaggtatctctgaacacaccggcacagctctctttgccactttatcttcctgacgacgaaacctttgcaagtttctggccgggggataactcctctttactggctgcgctgcaaaacgtgctgcgtcaggaacatagcggttacatctatctctgggcacgcgaaggcgcggggcgcagccatctgctgcacgcggcttgcgcggaattgtcgcagcgtggcgatgcggtgggctatgtcccgctggataaacgcacctggtttgttccggaagtgctcgacggtatggagcatttgtcgctggtctgtatcgacaacattgagtgtattgcaggcgatgagttgtgggagatggcgattttcgatctctacaatcgaattctggaatcgggcaaaacacgattgttgatcaccggcgatcgtccaccgcggcagttgaatctgggattaccggatctcgcgtcgcgactcgactgggggcagatctacaaattgcagccactttctgatgaagataagttgcaggcgctacagttacgcgcgcgtttgcgtggttttgaactgccggaagatgtggggcgtttcttgctgaagcggctcgacagagaaatgcgcacgctatttatgacgttggatcagttggatcgtgcgtcgattaccgcgcaacgtaagctgaccattccgtttgtgaaagaaattctgaagttgtagataaggtgtttattgtcggatgcggcgcgaacgccttatccgaactacgcgaagttaatccatagtattcgtaggccggataagacgtggcaagcgtcgcatccggcaatgtgcttcaactagcgatggagcacatcttaacccacgatttccagtacctgctccggtggacgaccaatccgcgctttgccattcgcgaccacaatcgggcgctccattagcttcggattatccaccattgcctgaatcagcgcctcttcgctaagcgaactgtcagccaggttcagttctttataaagatcctctttctggcgcatcaattcacgggcgctattcatccccagcattttcagcaaatcgcgcagcgttgccgcatcagcgggtgtctcaaggtagagcaccacttctgactccacgccgttttctttcagcaggttcagcgtttcccggctctttgaacagcgtgggttatggtagatttttacctgtttggtcattgttcttcctttaatgcgaattacatcttggtataaggcttaaagcgttcctgcagctggcgcaactggtcgatgcgcgcatcgtaacgcgcttgttgcaggctgcctaatttcacctgcgaactggcgctactcaacagcgaaatggcctgatcgagtcgtccggcgagcgcataaccttctgctcgcgcagccagctcctgatcgcggttatttagcgcggcttccgcctgtgccagcaaatcccagccgttgctgtcatctttattattaaaggtgtagcgattgagaatattggccgcttcttgtggttgaccgccttgcagataagcgttcgccaggttgagctgcaacaccggattggtgcgtaaatcgcgggcatttttcagacgattgatcgcctcattggctttgttttgcccaagatcgatatcagtagccagatcgagataccatgcgttgccaggttctgccgccagtaacggttgcagcgttttacgcgcctcgtcgtatttattggcttccatcgcctgtaaagcacgaccatattgtgctgctcgttgctgacgaacgtttcctttcgcccattcatccagcaaatcactggtgagctggttacgtccggaattatacatccccagtgtgcgcgctttcgccagatagaaatcttccgacgactgcaccaccatcgggcgcatctgattagcacggttgcgggcatctgccagacgactttccggcaacgggtgagtcaataaaatttccggcggacgcgaggagtaacgcgcctgatcgagtaatttttcgaggaaggttggcatcgcctgcggatcgaatcccgagcgttgcagcacctgaataccaatgcggtccgcttcctgttcattttgctgggtgaaactgatcatcccctgacgcgttcccgccagtgtaccggtcagcgccgccatccccgcctgcggactggccatcgccagtaaaatagaacctaacgcgccgacccaggtcagcggcgcgctgcgctgctgatcttccatcgctcgcgccaggtgacgttgggtgacgtgggagatttcgtgcgccataactgaagccagttgactttcgttatcggaataacggaacagggcagagtgcagcaccacgttgccgccaaagaaagcaaaggcgttaatttcgtcgttgttgatcagaaagaaatgaaacggtgtcttaaccgaattggcatgcgaaaccagacgcatccccagcgaattaatatattgcgttaacagcgggtcattaattaacggcgcgctgccgcgtagctggcggacataatagtcgcccatctgcatttcctgaccaatggaaagcgtgcttcctgcggaggttcccatatccggcaaggtgtctgcgctgtcggcaaacgccggggctacctgaccaatggtcatagcagcaatgagggttgcaaccaggttttttttcaactgcctgaacataacctctatcctgtatttctgaagatagtcatttgaccgatactgtgaaatatcgttcccaccgcgccgcctttgagtgtaacggcgaagattagcccactcaaatgacttttcagtttcctgaatccgtcataaaaagcgaagtcttttttgtgacatttcgatacaattgcggatcgcaatcccgctcttgaggttcagggaaggtctttatgctcgaaatgttgatgcaatggtatcgccgccgttttagcgacccggaagcgattgccttgctggttattttagttgccggatttggcattatctttttctttagtggcctgcttgctccgttgctggtggctattgtgctggcctatttgctggaatggccaactgtgcgcctgcaatctattggctgctcccgccgctgggcgacgtcgattgtattggtggtttttgtcggtatattgctactgatggcgttcgtggtactgcctatcgcctggcaacagggcatctacttaattcgcgatatgccggggatgctcaataagctttctgactttgccgccacgttgccgcgccgctatccggcgttaatggacgcgggcattattgatgcaatggccgaaaatatgcgcagtcggatgctgaccatgggcgattcggtggtgaaaatttccctcgcctcgctggtcggtttgctgaccattgccgtctatctggtgctggtgccattgatggtcttcttcctgctgaaagacaaagagcagatgctgaacgccgttcgtcgggtgctgccgcgcaaccgtggactggcaggacaggtgtggaaggagatgaatcaacaaatcaccaactatatccgcggcaaagtgctggagatgatcgtggtggggatcgccacctggctggggttcttgctctttgggctgaactattcgctgctgctggcggtgctggtcggcttctcggttcttattccgtacattggcgcatttgtggtgaccattccggtggttggcgtggcgctattccagtttggcgcaggcacggaattctggagctgcttcgcggtgtatctgattattcaggcgctggacggcaacctgctagtaccggtgttgttctccgaagcggttaacctgcatccgctggtgattattttatcggtggtgatcttcggtggtttgtggggattctggggcgtattcttcgccattccgttggcgacgctgatcaaagccgtgatccacgcctggcccgatgggcaaatagcgcaagaataatcttcagcccgacgaactgtttcgccgggctgatttttcaggattcctgacgtaaataaatagcccgataacacatactcaccagcactgcaccgccgataatattacccagcatcaccgggagcagattggcggtaataaaatggcttaccgtcagtgtcggaaaattgtctgcgctactgtgcgccagttgccagaaggaggtaggggcgaaatggcgaatggcaatggcgaacggaatcacaaacaaattggcgatacagtgctcaaagccactggcgacaaacagggtgatgggcaaaatcatggcgacgattttgtcgcataacgaacgcccgcaataactcatccacagcgccaggcaaaccatcagattgcacataatgccgaggctgacagattcagtaaatgtatgatgcattttgccctcggcgcagtgtaaaaccgcgactccccacatcgcgttttcactcatcaccagcccggaaaaccagattaacaaactgaaacaggcaatacctgccagattaccgcaggccaccagaagtgcgttaatcagccaagttcgccaactaataacgccccgactttttgccattaccgtcattaccgacgaggtgaacaggttggtgccgcaaaccgccagcaaaataaagccaagtgtaaagcaaaggccgcccaccagatgggttaatgcctgtgaagacggggcatcggcgataactgaaaggtaaaaagtaaatccgatcgccataaacacgccagcggacatcgccattaaaaagaccgacactttactgcgggcaattttatgggcggcaatccgttcagcgattgccgcttttctggcgctcaactgcaagtcgaaagagagtttgtttctcatgcatactcctgcaaaagcagattacaacacctcgcgaaccgagattcccagacgctgcattcgtgacagcagcgtggtgcgcttcatccctaatcgtgtcgccgcgccacggggcccggcaacaatgccattggtttctcgcaatacctgaacaatgcgctgacgttcttcttcgtcattctctggcgtcgtcgggtgcagcaactgcgccattgaactgcgaagcgctgaatcttcatttagcgtcggcagtaaacggctttgtcggacattaagatgtaaattcagactgttaccgcgagtcagcagtaccgctcgctcaatcacgttttccagctcgcgcacgttgcccggccagtcccacgacatcaactggcgtagcgcctcggtcgggatggcgtcaattgaacgattcatatggcgcgccattttttgcgtgaaatgctttgctaaaagagggatatcttccggacggtcgcgcagcggcggcaattccagtgggaagacattcaggcgataaaagagatcgctgcgaaactggcgatcttcaaccatttgccacaaatcacggttggtggcggcaatgactctgacatttaccgggatcgttctactcccgccgagacgctcaatctcccgttcctgcaatacgcgcagcagtttaggctgaagttctaacggcagatcgccaatttcatcgagaaacaacgtgccgccatcggcaatttcaaaacgaccacgatgggtattaatcgcaccagtaaacgcccctttgtcatgaccgaataactcactttccagaagactggcggggatggcagcgcagttgattttgaccagcggcttgtcgcgtcgcgggctaagttgatggatcgctctggcgatcacctctttgccggttccggtttcaccgcaaatcaacaccgtactgtcgctcttcgccacaatatctacctgctggagtaggtcttccattgcctggctttgatagataatgtcaccgacgcccagattcgaaaggagctgctcgctaagctggtggttttcttgctgcaaactttcctgcaaatcggtcatgctacgccaggcatcggcattgccaacggcaatagcgatgcgatcggctatgtgttgtagtagctggcagttttcctcactaaagagagtggaagaggtatgcgccagtaacaatgcacccggtgtatggttgccaaaggtaagcggtatcaggagcgcagattcgcagccgttagatgcaagtaagagtaataacgggtcgcgttgccagagaaacagatcgtctgcacggtgcgtcaaggtcggttgtcgggtttgtagcgtttgtgtcagcaatacactgtcgccaggcatattgcgtggcagacacgcacaatgtgaggcagaaagatcgctgcaccacaggctgaacttctcgttctttcgatgatcgcccagtaccatactgactgaagccagaccgaaaaaatgatggatctcacgagcgacgtcagcgatcagatcgtcgagatcaagatgtgacagcactgcattagtgatatccaccagtacccgatgatgatcgcgatctttctccagcaaacgcagcgccacctgttgttcttcatcattgagccatgattgcagaaccggggtgataatgcgtgccagccagttaaacagtgtgcaatcctggggagtaaaacggctgccgtgggtacgaataaagcgtagctccgccattccactactgccgagaaggacggcgtgacgcgaataatcgaccatctcgccctgatactctactgttgccgtcacatcgctgccatcatcatggtagcggtaatagaagttgcttttgagaacatgcagttcaataagttgtaccgggctgaacggcggcggcagcgggatgaaggcgcgtaataaagacgccttgccgtgtttctgtgctaaccgctccgcgagcattccgtttaccgcttcaattgttattccttgtggcggggcaaacatcgcctcgtctgacatagccatcaacagtccttattaatgagaaatccttctcacgcaatttttctggccatcagatagatggccggttcctgcacaatttcatccaacagatgaatgaattgaatgctacgcgcctgccacacagacgtcgcgtcatctgccagtagcgcgaatgcccgggtcaacagggcggtgtggctggcgtcaataacaatctcaccaaaggtcatcacccccagcatcttacgtcgggcttgctcctcttcgacctgtgcaagccaatcttcgtattccgtcagtgggcagcggaaggcgacattcagacaatcaatcacgccaacgtgatgaccgatagccagcgagtaatacattacctgagagctgtgttccggcatctcgtcgctactggcgacaaacttttttcgcagcgtccagaaaacaatttccccgcactcctcagccatgtaacccccggagaacgcgaaagagttgctgaacgatactattgagacgcggatcgtcggcttcgcgcaaccaggtgttaacccgatttcctgtaggatcgtcgcttaaatggcgcaggagccgatcgcaaatttctcgcccctgacgatagcccgccagccgccgcgcttctcgctcaatggcgatacgctgtgatggcgggatctgtggccacaacggttgcatagtcaccccggtgggatcgcgataatccacagcgtgaatcttctgttgcagcaaaccgagcgccacggcgaaaccgtgaatggtggcggccggtgttggcgggcagccggggatccaaacatcaatggggacaatggtgtcgctgccgccccagacgctgtagagatcgtggaaaataccgccgccgacaccgcacgcgccgtaggaaacacagattttatgatcgggggcagactcatacgcccgaagtgcaggcatacgcatcgcccgggtgactgcgccagtaaataacaaaatatcggcgtgacgcggtgatgaaacaaccttaatgccaaaacgttctgcgtcgaatactggtgtgatggcagcaaaaatttcgatttcacaggcgttgcagccgccgcaatcgacgcgataaacgtaagccgagcgacggatatcctgtagcaaatgctgcttcatcttttgcgtttgctcgtccagcgtgatgggctggctgacatattgcgtaagcactggactcatagctgctccttagccaccagcggtacatctgtatcgtcgttgatcagcgtcgcgcgttgtttgcactccgggcagacgctcgcttgcgcccgcaacatttcgcggttttgtggcgcattttgttgctgtgccaacaattcagcagccagtgcgacggttttttgcggggcaaacgggcgttcgcaacggctgcaacgttgtagatggaacgtcgcgcgggtatagagatcggctttattggtgacggtcagttcaaagttattggtaagctggatggctctggtcggacacacttcttcacaacgtccgcagtaaatacaacgccccagatagagctgccaggtgcgcgaattttgctggtcgtcggtctggatagtcagcgcatttgccggacaagcacaggcgcaggcaccgcaggcaatacattggctgggcatcaggtccggtttcccgcgaaagcctgggctgacctccagtggcgcgaagggatatttcaccgtcgcggttccggcgcgcataatagttttcagtaacttcagcatcttctgtccttacttcagcggcgaacggttacgatcaatgccgtagcgttcgatctctttatacggcacggtttttgactggcgcttgcgcacatctaccagcgtcacacggtcggtacaggagtagcagggatcaaggctaccgataatcagcggtgcgtcagaaacggtattgccgcgcagcatgtaacgcaacaccggccagttggcgtaggtggcggcacggcagcgccagcggaacaatttttggttatcaccgagcatgctccagtgcacgtcttcaccgcgtggcgcttcaacaaagcccagcgcgaatgcgtgaggtttatagctaaagccttcggtcagcagtggggtatccggcatgttgtcgagggcaaattccagcattgccagcgaatcaaacgtctctttgacacggaccatcacgcgggagaaaacatcgccgccggtaaaggtaaacagtgtttttggaatattgccgtagtcggcgtaggggtgatcaaagcgcaaatcacgggcgatttgtcggtcgagaatgccaatgccctgagtgcgttgttccatattcggcgtagcaagcagcatctctaccagctccgacacgtcggcgcgcatctcgcgcaccagtttcagcgtttgcagacgttgctctttgagaatatcgcggcgaacaccaccaatcagattcagaccgtaggttttacgcgacccgatcagcaattccgccatcgtcatcgacttttcccgcacgcggaaaaattgcataaagccggtatcaaaaccaacgaaatggcaggagaggccaaggttaagcaaatgactgtgtagccgttcgacttccagcagaatcgagcgaatagtatgtgctcgttgcggcacctcaatccccagtgcattttcaaccgaattggtataggccacactgtgggcaaaaccgcaaatcccacacacgcggtccgataagaaggtcacttcgttgtagcccatccgcgtttctgccagtttctccatgccgcgatggacataaaacaggcggtaatcagcatcgacaatttgctcgccatccacaaacaagcggaagtgacccggttcatcggaggtgatatgcagcgggccgacagggatcacccgcgcatcgctgttgccctcattgataaacgcatacgtttcggaatctgtcgtcggttcagggcgcagtcgataatccatcgcatctttgcgcagcggatgcatatcttccggccagtcatcgggcaacaccaggcgacgctgatccggcaggccaaccggaatcagcccgtacatatcgcgaatttctcgctcgccccagaccgcggcagggacgcgcggtgtgactgacggaaactcccgactgtcggcatcgaccagtgccttcaccacgatccagcatttttcggccccttccattgaaagggcataataaaccgcgtaatgaccgttaagtgtccgctcgtcgttgccaaacaggactggaagccagccatcatgttgataataaagataatgtacaacgtcaggcagcagattgattttcaccgtaatggtgacctgttcaggcgtttgtcgctcttcatccagctccgcgccggggaactgcgttttcagggcggcgagaatcgcttcgccacgatttgacgatgaattaacgttcactgtgtttctccgaaacagatgcggtgcctgaaggcaaaaaatcatgccaggtgctacgttgtgcaggcaggtcgtgcgtccctgagaggactatagtggaagcgccagccaggatcctgatgacaggttgtggaatatgcgttcccatcgccagcatcatgaccagcagaatcaccattggcgaggtggtcaaccagccgagatcaccccggttaacggcctgcggcggtttcgccattaacacccgcgcagccatccgtaccaggcccgccagcaccagcgttaacagcaataacagcaggacgataatcagcaggtgattacgtgccagtcctgcggtaacggtcataaattcgctaagaaaaatgttgaagggcggcatccctgccagcgccagcgcaccgccgccaaacagcacggcggtaaatggcatgattttgagcatcccacagacgacgttgagatcgcgcgtgccgtacttgagcagtacattgccggaaccgcagaacagcagcgtttttgccagactgtggtttaaggtgtgcagcagcgcggcaaaaattcccagcggcccgccaatgcctagcgccaccgcgaccagccccatgttctccacgctggagtacgccagcagacgcttaatgtcccgctgtaccagaatgaaaaatgccgccacggcaaccgacaacatgccgaagatgagcaacaaccggttggggaaatcgctgccgatggcttggcaaataatgatgtaatagcgaatcagcaccaacagcgcgcagttcagcaatacggcggagagcagggcgctgaccggactcggtgcttcactgtgagcatccggcagccaggcgtgcatgggaaatagcccggttttggtaccaaagccaattagcacaaacacaaaggccaacagcattaatgttggttcaagcaaggacgattgcttaagaacctcgctccagaatatcgccatttctgcctgcggcataacgctggcggcgttggcgtataccagcacggtaccgaacagaccaaaagcgacaccaacagtacaaataatgatgtacttccatgctgattccagcgatgaacgctgaccgtaaatgcctaccagaaacgccgagcttaaggtggtggcttcgattgccgcccacatcacaatcaggttattgctggtaacaaccagcagcatggtgaacaaaaacagatggaagaaaccgtagtaatcgcacagcgtaacgggtgaaagctcgccgtgtgccacttcatgacgcatgtagccaatcgagtaaacaccggtgagaaagccaatcacaccaagaatggcgaggaacaaaccgcccagaccatcaatatgaagccacagtcccgcagcgaatatttctcctgcatcagcggcagtttggaccacccagagtgccagaatcagcagcagtgtgatccctaagctatgtaatacagtcaccgtacaagtcgcagagagcccccgtttccggcaggcaaaacagagcagcgaaaaaagcagcggcgtgagcaggagtaaagcgaacatcacagaataactcatctcattatcccttcagcgcggtcaagttgttcacgtccagcgtgccgtgggtacgccatatttttcttgccagtaacaccatcacaatgacggcgaagatggcgtcggtagcgatagctatttccaccagttccggtgctcgccaggcaagaagcgccagcaccagatgggagccgttttccatcaggcagtaaccaaaaatttgctgcaggatattgcgctggctgacaatgcacagcaggccaagcagaaaatgacctaacgctaccgccagcgccggtttcagcccggtagccatcggtagcttcacgggctgaacgacaaatgcgcaaagcaggacaattaacgccgcgagcagtgccatcattgccggaccgaataacgctttttccgggatgttctggggaatatttcgtgcagcgtaagtcatgattaacggtaccagcagcactttggtgataaaggcgctggcggaccagatcagcagttgctctgcggcgaacaggcacgagagagtggcgaaaatagacaccagcaccagcgactggcaggcgtaaaatccgcatgacaggcgatagcttttgacgctaatcacaaacagcgatgtcagcatcatcagtcccgccagattatttacgatcatagaaccggtcattcatcatctccttactgcaaccaggtcgcggcgattacgctggaaatcagcgacatcacaatcagtacaatcaacaccaggcgcattgaccctggcagcggtgcggcatcggcgacggcctcgctcggtttgccaggcacaacgcgaccaaaccagcgaataaaccaggcgaaactggcgaccgattcaatcatcagcagaatcatggcgggcagcaggatccagtactccactgacaacgcaaaaccggcagcaaacagcgggaatttactgaagaagccgttgaacggcggcacaccggtaatcgccagcgctgccacgcagaaacccacgcctggcaacggcagggtgtgcaatacgccacgcagacgcggcaacaagcgcgtgccgcagctgtaactcagcgcacctgctacaaggaaaaacaggcttttagcgaacgcgtggttgacgatgtaggcgatgctgccctccagtgccagccgcccactttcaccttcgatgcggcgtggagataggcactgatcggtgttggcgcttccattgcatccggtagccacgcttgcatcggtagctgggccgatttcccccacgcggcaaacaggatgccgccataaaccagataacgtgcgtcgccgtgtaactcgctcatcgcgctaagcgcaaacgttccggtctgcaaaaacagcgtggcggcggcaagatacaaccccaacgagccgatatgagtgataagtaacgcttttagtgctgaacgctgtgctttatcgctctggtaataactgatcaacgcccaggagcagccgcccgtaatttcaaaaaacaacaactgaccgagcagcgtcgaggagagtaccagtcccgccatcgcgccgataaacaacagcaaaaatgcgtaataacgattcgtgccgttatgcgggtgttcgcgatttttatccgtcagataacccgtggagtagatcgtgaccagcaaaccgagaaacaccaccacaaacagaatcagcgtactcacgcgatcaatgaccaggccaaacaatgccacatcccccacgttgaccaatgtcaacgtgacggcaactttatcggcctgataaaacgcggagatcagtgacaacatgcacagcgtggtcagcgcggcgaacaaaaccccccattcggcggcccgacgttgtggcgaaaacgaaacgaccagtgcgccgataaaaggcagcaataacgtcgtcagagcaagattttccatattccgtcagtgctccttacagaccggttaaccagaagacccatgcaagcgcagcaaggctgaagccaagccaggtcacatggtgaatgagtaaaaaacgcccgcgtgccagcgtgttttctgcgattgaggccagtacaaaaatcagcaaaaccttgagcagcgtaacgacaagtgaagtcagcaggcaggcgagagaaagttcttgcgcgcgcccaaagggcagaaacagggccacaaacagtgatgccatcacgacctgtttcagccccagcccccatttcgccagcgccagcccggcaccggaatattcggtcagcgggccttcctgtaattcctgttctgcttcagcaacatcaaagggaatttttcccatctcaatgaagcaggcaaaaccacaggccagtaacgccagtacggtggttagcggcgagttccagcccatcgccagcgtattgctgatcatctcgatatgcgtggaacctgctatcagcgccaataccagcagtgagagaataagcattggttcgaccagaatgccgagcgtcaactcgcgactggcaccgactcccgcaaacggacttccggtatccagcccggaaagagcaaagaaaaaacgaaacagggcaagaagatagataagggtgatcagatcgccgccgcccgcaaaaggggaaacggtaataaacagtggtaaggccatcgccagcaccagcatgctgctgattaatacccacggcatcaggcggaacatcagacctgaagatgtcggcgcaacttcctggcgtttaaacagtttgtggatatcgcgataatcctgccagatccccggcccgcggcgggagtgcatacgcgcgcgtatctgccgggaaatacccgtaaaaagtggggttagcatcagcagaatcacggcctgtgctaacgcaaaaataaccagatatccgtcgcaaagagtttgtctcatggtgatttccttagacggcaatagcgattagcagcacaaccagtgcggcgaccacatacaggcaatagagacgaaagtcgccgctttgcagatgctgtatttctttggccagccgttgggtggcgctcacgatggggcggatcacccgctcatcccagaagggttctgtgctctgagccctggcggtgacgtgcgcaaaacctttatttagcctcagcgtagggtcgagctgttgtcgtagacgaaataacgcagagaagaccacacgcagcggctgcatcacgccattgcctgacggggccatcgcattttcccagccgtagccgcatgcccaggcatctcctgtgcgacgaaacgctgcgcggcgcgaacgacaccacagccagtaaaggccaggcagcaaaggcatcgccagtagtaacagcaacagtaatgagggggtgacctgtgtatgaaacgtgccgggtacaagtgctattccgctggcgacagtgacgggaggggtattggtaaacgcatgggcaatatgcattatcttcggtgccagccaactggcactaagcgcaattaatacgcagagtgccgcgagcagtagcatggcgacgatcatcgtatttggcacttcctgtgcctcttcagcgtgtgtactgcgcggcgcaccacagaaagtaataccgtacatttttacgaagcacattactgccagcccaccagtgactgccagcattaccatagcaataggacccgcaagttgtagcgctacggcttccacacgacttagtgagaacagcgactgccaggtgtaccattcgctgataaaaccattcagcggaggaatggctgatatcgcgaggcaaccaatcaggcatgctgcggctgtccacggcatccgtttcgccagtgcccccattttttccatgtcgtgggtatgcaaacgcgaaataatcgcgcccgcgccgagaaatagcagccctttgaacagcgcatggttgagcagatgaaacagtgcgccgagcagtccaaccacggtgagcagcgggtcgtgcagtgacagaccgaccatcgccacaccgactgccagcaaaataatgccgacgttttcgacggtactccaggccagcagccgtttgatatcctgttccgccagcgcatacagcacgcccaggagcgcggagattgcgccgatcgccatcaccagaatgccccaccacagcggcaaacccgtttgcgccagcaggtccatcgctactttcaggatgccgaaaataccgattttgaccattacgccagacatcaacgccgaagcgtgcgatggtgcggcagggtgagcgcgcggcaaccagctgtgcaacggcatcatcccggctttcgcgccaaaaccgaaaaaggccagcagaaacaccgccgacgccagccccggagaaagtgaaagcgtgcgaaactggcaaaatcgaggctgccgctttcgcgccccatcagcaagaaggcgatcataatcagcaccgatccggcgtgggcgataaaaaagtagagcatgccagcgttgatcgacgttttatcctgcctggcaatgaccagaaaccaggaagacagcgacatcatttcaaacagcacgatgaaccaaaaagcgttgtccatcaccagcagggcaaccatcgatgcgatgaaaagattcataaagaagcccatcgccgccgcgcctttgccctcgtattcgcgcatataagtcaatgaatagagcgaacaaaccaccaccagcaaggagataaccagcaccataaatgccgagaggctatccattcgcagggttaaatcggcaaagtcaaaaggggtggcaaaatgggcgactaaagttacaccagcatgtaattgcgtaattccgctgatgatgccaatcacgccgcccaccagcgatgtgatgccggaaagcttaatagccagtctgtccagaccgagtaaaaacagcgaagccagactggcaaacagatagaggatcagcgaccaggttaataattgcagggcatccattagcgttgctcctgagtgagggaaaggggatcctccccgccattggcaaaccagcttgcggcaaggcgctgtttttctttcatctgtcgttgcaggctatcgtcggtgatcagccgtaacgcctgattcgggcaagcgcgaacgcaggccggaccttctggcaagaaatcacacaggtcgcatttcaccgcgacggtctggacacccggttcccagcgcagcaatgcatgttggggcggcacgttttcttcgccgtctttgagtgagccttcagcctgaaaaacatattgcgcaggggcattcaccggacggcttcctgaagcgctgattgcgccaaatgggcagaccacggcgcaaagcttgcagccaatacagaggctttcgttgagttggatcgcatcatccctctgggagatggcattaaccgggcagacctgcaggcaaggggcttcctcacagtgatgacacacgacaggggcagtgagtgttgacgtcttcgccagggccaggcgcgggtgttgctgtaaaccttgcgttttatgcacgtccgaacaggcagcgagacaggtattacatcctgtacaccacagtggttcggccaccacaaagcggttcatgtcggctccttgaaaatgatatgaaacattgcatttcatattgcataaaggatgccattctgattaactcaatatattcaataagttatgtattgactggattctgaacggtacaaaaatgatggtcattaacgttcagcaaaaaatggattcgacacccgtgtcgcaggggaaagcgagaatgtgatcttgatcacgagaagtgaggtatgctggccgcaagcgcagccagcacggaatggagcaaagtaatcaggcgtgttctttcagccagttcagcacaacgtcgtggtgattgctggttttgaaatcgtcaaagacatgttcgattttgccatcagcgtcaatcaggaagctgatgcgatgaatgccatcgtaggttttgcccatgaaggacttttcaccccagacgccgaattgttcgcacacctggtggtcctcatcagacaggagcgtaaagttaagcagctctttttccgcaaaacgggagagtttttcgggtttatcggtgctgatacccagcacatcaacgcccgcttttttcaactcatccatgttatcgcgtaagccgcaggcctgtacggtacagccgggggtcatggctttcgggtagaaataaaccagaacacgctgtccctggaagtcggtcaaattaacttgttctccgtcttgatccggcaagctaaatttcggtgcgatatcaccggctttcagtggattcattacttaactccatcctgttcatcatgttgggaataattgacgacgttaatactgccttgtgcattgagttctgtacatagggctttgaacgcttgctcaatatttgctgcgtccgcagatgcggggctgtgggcggttatctgaatatgcaactgcgcagcccgttcattttcagcaggttgcgtgcgcgacaccagctccgcaatgttcatatgatgcgcgtcgaaaagtgctgtgaagcgttcaattaaatgcggggagtctgccacatcgacctgaacccagacagatgctggcattggcggacgcggacgcgccgtcgtgcgcttcatcacgattaaaagatccagttcggcacctttcaacggtaacgttgattcaatcagagtaatggcattccatgaaccggaaagcagcataataaacgtgaactcttctcccagcatcgccaggcgactgtcttcaatattacagccgcaactactgacatgacgggtgatggtgttcacaattccagggcgatcggcacccaacgcagtgatcaccagataatgttgcgatgacagtgtcaaactggttattcctttaaggggtgagttgttcttaaggaaagcataaaaaaaacatgcatacaacaatcagaacggttctgtctgcttgcttttaatgccataccaaacgtaccattgagacacttgtttgcacagaggatggcccatgttcacgggaagtattgtcgcgattgttactccgatggatgaaaaaggtaatgtctgtcgggctagcttgaaaaaactgattgattatcatgtcgccagcggtacttcggcgatcgtttctgttggcaccactggcgagtccgctaccttaaatcatgacgaacatgctgatgtggtgatgatgacgctggagctggctgatgggcgcattccggtaattgccgggaccggcgctaacgctactgcggaagccattagcctgacgcagcgcttcaatgacagtggtatcgtcggctgcctgacggtaaccccttactacaatcgtccgtcgcaagaaggtttgtatcagcatttcaaagccatcgctgagcatactgacctgccgcaaattctgtataatgtgccgtcccgtactggctgcgatctgctcccggaaacggtgggccgtctggcgaaagtaaaaaatattatcggaatcaaagaggcaacagggaacttaacgcgtgtaaaccagatcaaagagctggtttcagatgattttgttctgctgagcggcgatgatgcgagcgcgctggacttcatgcaattgggcggtcatggggttatttccgttacggctaacgtcgcagcgcgtgatatggcccagatgtgcaaactggcagcagaagggcattttgccgaggcacgcgttattaatcagcgtctgatgccattacacaacaaactatttgtcgaacccaatccaatcccggtgaaatgggcatgtaaggaactgggtcttgtggcgaccgatacgctgcgcctgccaatgacaccaatcaccgacagtggtcgtgagacggtcagagcggcgcttaagcatgccggtttgctgtaaagtttagggagatttgatggcttactctgttcaaaagtcgcgcctggcaaaggttgcgggtgtttcgcttgttttattactcgctgcctgtagttctgactcacgctataagcgtcaggtcagtggtgatgaagcctacctggaagcggcaccgcttgcggagcttcatgccccggctggaatgattttgccggtgacctccggtgattatgcaatcccggtgaccaacggtagtggtgctgtcggtaaggcgctggacattcgtccaccagcccagccgctggcactggtttctggcgcgcgtacccagttcacgggcgataccgcttcattgctggtggaaaatggtcgtggcaatactctgtggccgcaggtggttagcgtgctgcaggcgaaaaactacaccatcacccaacgtgatgatgctggtcagacactgaccaccgattgggtacaatggaaccgtctggacgaagacgagcagtatcgtggtcgttatcaaatctctgttaagccgcagggttatcagcaggcggttacggttaaactgctgaacctggaacaggcgggcaaaccggttgcagacgcggcttccatgcagcgttacagcacggagatgatgaacgttatttccgccggtctggataaatctgccactgacgccgcgaacgctgcgcaaaatcgtgcctccaccactatggacgtacaaagtgcagctgatgacaccggtttaccaatgctggtcgtacgcgggccgttcaatgtggtttggcaacgtctgccagcggcgctggaaaaagtgggcatgaaagtgaccgacagcacccgttcgcagggcaacatggccgtaacttataagccgctgtctgacagcgactggcaggaactgggcgcgagcgatccaggcctggcatccggtgactataaactgcaggttggcgatttagataaccgcagcagcctacagttcatcgatccgaaaggtcatactctgactcagagtcagaacgacgcgctggtagctgtcttccaggctgcgtttagcaagtaaaaatacagggctggaatcatccggcccttttttctgatatgatacgcaaacgtgtgcgtcggcaggaaaacgcgattttagcggtaattcgcacgaaatttgtttgtcggacgtagttcggataaggcgttcacgccgcatccgacaaaacatccggcacaccagacagcaaaagattttaaaacgttaattcacacccaggagtgataaagatgcaaaagcaagctgagttgtatcgtggtaaagcgaaaaccgtatacagcacggaaaacccggacctgttggtgctcgaattccgcaatgatacgtcagcaggggatggcgcgcgcattgagcagtttgatcgcaaaggtatggtgaacaacaagttcaattacttcattatgagcaaactggctgaagcgggtatcccgactcaaatggagcgtctgctctccgataccgaatgtctggtgaaaaagctggatatggtgccggttgagtgtgtcgtgcgtaaccgtgctgctggctctctggtgaaacgtcttggaatcgaagaaggtattgagctgaacccgccgctgttcgatctgttcctgaaaaacgacgccatgcacgatccgatggtcaacgaatcttactgcgaaacctttggctgggtgagcaaagagaacctggcgcgtatgaaagagctgacctacaaagcgaacgacgtgctgaaaaaactgttcgatgatgctggtctgattctggtcgacttcaagctggagtttggcctgtacaaaggtgaagtggtactgggcgatgagttctccccggacggcagccgcctgtgggacaaagaaacactggagaaaatggacaaagaccgtttccgccagagcctcggtggcctgatcgaagcctatgaagccgtcgcccgccgcctgggtgtacagctggactgatttttctggttgcttgtttctttagccggagggtactccggctaaatgtctttgatacccccgctacaatacttctcattatctccctttgacaggaaagtcataccaggccaatatgtatatacataacgtatatcccaaaaagggggggctatggaaactactgtatttttaagtaatcgcagtcaggccgtcagattaccgaaagcggtcgctctgccagaagacgttaagaaagtagaaattattgcgattggtcgtacaagaatcatcactcccgccggtgagtcctgggacagttggtttgatggcgaaaatgtgagtgcggattttatggatatccgtgatcaacccgcaatgcaggaaagggaatcattttgatgctgaaattcatgctggataccaatatctgtattttcactattaagaataaaccagtacatgtcagagagcggtttaacctgaattctggc

SEQ ID NO: 226 - DNA, 23030 bp, Escherichia coli
  source 1..23030: mol_type = genomic DNA
ccgcgtaaccatcgacttcaccggttctgtagacggcgaagagttcgaaggcggtaaagcgtctgatttcgtactggcgatgggccagggtcgtatgatcccgggctttgaagacggtatcaaaggccacaaagctggcgaagagttcaccatcgacgtgaccttcccggaagaataccacgcagaaaacctgaaaggtaaagcagcgaaattcgctatcaacctgaagaaagttgaagagcgtgaactgccggaactgactgcagaattcatcaaacgtttcggcgttgaagatggttccgtagaaggtctgcgcgctgaagtgcgtaaaaacatggagcgcgagctgaagagcgccatccgtaaccgcgttaagtctcaggcgatcgaaggtctggtaaaagctaacgacatcgacgtaccggctgcgctgatcgacagcgaaatcgacgttctgcgtcgccaggctgcacagcgtttcggtggcaacgaaaaacaagctctggaactgccgcgcgaactgttcgaagaacaggctaaacgccgcgtagttgttggcctgctgctgggcgaagttatccgcaccaacgagctgaaagctgacgaagagcgcgtgaaaggcctgatcgaagagatggcttctgcgtacgaagatccgaaagaagttatcgagttctacagcaaaaacaaagaactgatggacaacatgcgcaatgttgctctggaagaacaggctgttgaagctgtactggcgaaagcgaaagtgactgaaaaagaaaccactttcaacgagctgatgaaccagcaggcgtaatttacgcagcataacgcgctaaattcgcacaaaggcccgtcaccgccaggtggtgggcttttttttgtcatgaattttgcatggaaccgtgcgaaaagcctctttcggtgttagcgtaacaacaaaagattgttatgcttgaaatatggtgatgccgtacccataacacagggactagctgataatccgtccataaggttacaatcggtacagcaggttttttcaattttatccaggagacggaaatgtcatacagcggcgaacgagataactttgcaccccatatggcgctggtgccgatggtcattgaacagacctcacgcggtgagcgctcttttgatatctattctcgtctacttaaggaacgcgtcatttttctgactggccaggttgaagaccacatggctaacctgattgtggcgcagatgctgttcctggaagcggaaaacccagaaaaagatatctatctgtacattaactccccaggcggggtgatcactgccgggatgtctatctatgacaccatgcagtttatcaagcctgatgtcagcaccatctgtatgggccaggcggcctcgatgggcgctttcttgctgaccgcaggggcaaaaggtaaacgtttttgcctgccgaattcgcgcgtgatgattcaccaaccgttgggcggctaccagggccaggcgaccgatatcgaaattcatgcccgtgaaattctgaaagttaaagggcgcatgaatgaacttatggcgcttcatacgggtcaatcattagaacagattgaacgtgataccgagcgcgatcgcttcctttccgcccctgaagcggtggaatacggtctggtcgattcgattctgacccatcgtaattgatgccagaggcgcaactgtgccgctatacttatccagggcggcacaacgctgtaagcggcttgcgcctgagaatggcatttgcgtcgtcgtgtgcggcacaaagaacaaagaagaggttttgacccatgacagataaacgcaaagatggctcaggcaaattgctgtattgctctttttgcggcaaaagccagcatgaagtgcgcaagctgattgccggtccatccgtgtatatctgcgacgaatgtgttgatttatgtaacgacatcattcgcgaagagattaaagaagttgcaccgcatcgtgaacgcagtgcgctaccgacgccgcatgaaattcgcaaccacctggacgattacgttatcggccaggaacaggcgaaaaaagtgctggcggtcgcggtatacaaccattacaaacgtctgcgcaacggcgataccagcaatggcgtcgagttgggcaaaagtaacattctgctgatcggtccgaccggttccggtaaaacgctgctggctgaaacgctggcgcgcctgctggatgttccgttcaccatggccgacgcgactacactgaccgaagccggttatgtgggtgaagacgttgaaaacatcattcagaagctgttgcagaaatgcgactacgatgtccagaaagcacagcgtggtattgtctacatcgatgaaatcgacaagatttctcgtaagtcagacaacccgtccattacccgagacgtttccggtgaaggcgtacagcaggcactgttgaaactgatcgaaggtacggtagctgctgttccaccgcaaggtgggcgtaaacatccgcagcaggaattcttgcaggttgatacctctaagatcctgtttatttgtggcggtgcgtttgccggtctggataaagtgatttcccatcgtgtagaaaccggctccggcattggttttggcgcgacggtaaaagcgaagtccgacaaagcaagcgaaggcgagctgctggcgcaggttgaaccggaagatctgatcaagtttggtctgatccctgagttcattggtcgtctgccggttgtcgcaacgttgaatgaactgagcgaagaagctctgattcagatcctcaaagagccgaaaaacgccctgaccaagcagtatcaggcgctgtttaatctggaaggcgtggatctggaattccgtgacgaggcgctggatgctatcgctaagaaagcgatggcgcgtaaaaccggtgcccgtggcctgcgttccatcgtagaagccgcactgctcgataccatgtacgatctgccgtccatggaagacgtcgaaaaagtggttatcgacgagtcggtaattgatggtcaaagcaaaccgttgctgatttatggcaagccggaagcgcaacaggcatctggtgaataattaaccattcccatacaattagttaaccaaaaaggggggattttatctcccctttaatttttcctctattctcggcgttgaatgtgggggaaacatccccatatactgacgtacatgttaatagatggcgtgaagcacagtcgtgtcatctgattacctggcggaaattaaactaagagagagctctatgaatcctgagcgttctgaacgcattgaaatccccgtattgccgctgcgcgatgtggtggtttatccgcacatggtcatccccttatttgtcgggcgggaaaaatctatccgttgtctggaagcggcgatggaccatgataaaaaaattatgctggtcgcgcagaaagaagcttcaacggatgagccgggtgtaaacgatcttttcaccgtcgggaccgtggcctctatattgcagatgctgaagctgcctgacggcaccgtcaaagtgctggtcgaggggttacagcgcgcgcgtatttctgcgctctctgacaatggcgaacacttttctgcgaaggcggagtatctggagtcgccgaccattgatgagcgagaacaggaagtgctggtgcgtactgcaatcagccagttcgaaggctacatcaagctgaacaaaaaaatcccaccagaagtgctgacgtcgttgaatagcatcgacgatccggcgcgtctggcggataccattgctgcacatatgccgctgaaactggctgacaaacagtccgttctggagatgtccgacgttaacgaacgtctggaatatctgatggcaatgatggaatcggaaatcgatctgctgcaggttgagaaacgcattcgcaaccgcgttaaaaagcagatggagaaatcccagcgtgagtactatctgaacgagcaaatgaaagctattcagaaagaactcggtgaaatggacgacgcgccggacgaaaacgaagccctgaagcgcaaaatcgacgcggcgaagatgccgaaagaagcaaaagagaaagcggaagcagagttgcagaagctgaaaatgatgtctccgatgtcggcagaagcgaccgtagtgcgtggttatatcgactggatggtacaggtaccgtggaatgcgcgcagcaaggtcaaaaaagacctgcgtcaggcgcaggaaatccttgataccgaccattatggtctggagcgcgtgaaagatcgcatccttgagtaccttgcggttcaaagccgtgtcaacaaaatcaagggaccgatcctctgcctggtagggccgccgggggtaggtaaaacctctcttggtcagtccatcgccaaagccaccgggcgtaaatatgtccgtatggcgctgggcggcgtgcgtgatgaagcggaaatccgtggtcaccgccgtacttacatcggttctatgccgggtaaactgatccagaaaatggcgaaagtgggcgtgaaaaacccgctgttcctgctcgatgagatcgacaaaatgtcttctgacatgcgtggcgatccggcctccgcactgcttgaagtgctggatccagagcagaacgtagcgttcagcgaccactacctggaagtggattacgatctcagcgacgtgatgtttgtcgcgacgtcgaactccatgaacattccggcaccgctgctggatcgtatggaagtgattcgcctctccggttataccgaagatgaaaaactgaacatcgccaaacgtcacctgctgccgaagcagattgaacgtaatgcactgaaaaaaggtgagctgaccgtcgacgatagcgccattatcggcattattcgttactacacccgtgaggcgggcgtgcgtggtctggagcgtgaaatctccaaactgtgccgcaaagcggctaagcagttactgctcgataagtcattaaaacatatcgaaattaacggcgataacctgcatgactacctcggtgttcagcgtttcgactatggtcgcgctgataacgaaaaccgtgtcggtcaggtaaccggtctggcgtggacggaagtgggcggtgacttgctgaccattgaaaccgcatgtgttccgggtaaaggcaaactgacctataccggttcgctcggcgaagtgatgcaggagtctattcaggcggcgttaacggtggttcgtgcgcgtgcggaaaaactggggatcaaccctgatttttacgaaaaacgtgacatccacgtccacgtaccggaaggtgcgacgccgaaagatggtccgagtgccggtattgctatgtgcaccgcgctggtttcttgcctgaccggtaacccggttcgtgccgatgtggcaatgaccggtgagatcactctgcgtggtcaggtactgccgatcggtggtttgaaagaaaaactcctggcagcgcatcgcggcgggattaaaacagtgctaattccgttcgaaaataaacgcgatctggaagagattcctgacaacgtaattgccgatctggacattcatcctgtgaagcgcattgaggaagttctgactctggcgctgcaaaatgaaccgtctggcatgcaggttgtgactgcaaaatagtgacctcgcgcaaaatgcactaataaaaacagggctggcaggctaattcgggcttgccagcctttttttgtctcgctaagttagatggcggatcgggcttgcccttattaaggggtgttgtaaggggatggctggcctgatataactgctgcgcgttcgtaccttgaaggattcaagtgcgatataaattataaagaggaagagaagagtgaataaatctcaattgatcgacaagattgctgcaggggctgatatctctaaagctgcggctggccgtgcgttagatgctattattgcttccgtaactgaatctctgaaagaaggggatgatgtagcactggtaggttttggtacttttgccgttaaagagcgtgctgcccgtactggccgcaacccgcagaccggtaaagagatcaccatcgctgctgctaaagtaccgagcttccgtgcaggtaaagcactgaaagacgcggtaaactaagcgttgtccccggtggggatgtgacgaagttcaagggcgcatctactgatgtgccttttttatttgtattcggtgactttctgcgtcttgtgggctgacaattgcccccgtttcttgtcacaataggcctttgcgcgcatcgatacgttgcgtgaggtacacagtcatctacagcggagtgttgttacaccatgatggacagcttacgcacggctgcaaacagtctcgtgctcaagattattttcggtatcattatcgtgtcgttcatattgaccggcgtgagtggttacctgattggcggaggcaataactacgccgcaaaagtgaatgaccaggaaatcagccgtgggcagttcgagaacgcctttaacagcgagcgtaatcgcatgcagcaacagctgggcgatcaatactccgagctggcagcgaacgaaggctatatgaaaaccctgcgtcaacaggtgctgaatcgtctgatcgacgaggcgctgttggatcagtacgctcgtgagctgaaactgggtatcagtgatgagcaggttaaacaggcgattttcgcgaccccagccttccaggttgacggcaaatttgataacagccgctataacggtatcctcaaccagatggggatgaccgccgatcagtacgcccaggcgctgcgtaaccagctcactacccaacagctgattaacggtgttgccggtaccgattttatgctgaaaggtgaaaccgacgagctggcggcactggtcgcgcaacaacgcgtggtgcgtgaggcgactatcgatgttaacgcgctggcggcgaagcagcctgtgaccgaacaggagattgccagctactacgaacaaaacaaaaacaatttcatgacgccggaacaattccgcgtgagttacatcaagctggatgccgcaacgatgcagcaaccggttagcgatgcggatatccagagctactacgatcagcatcaggatcaattcacccagccgcagcgtacccgctacagcatcatccagaccaaaactgaagatgaagcgaaagcggtacttgatgagctgaataaaggcggtgattttgctgcattagccaaagaaaaatctgccgatattatctctgcccgtaacggcggcgatatgggttggttagaagatgccactatccccgacgaactgaaaaatgctggtctgaaagaaaaagggcaactgtctggtgtcatcaaatcttcggtcggtttcctgattgtacgtctggacgacattcagccagcgaaagtgaaatcgttagacgaagtacgtgacgacattgcggcgaaagtgaaacacgaaaaagccctcgatgcgtactatgcgctgcagcagaaagtgagcgatgcggcaagcaacgacaccgagtctctggccggtgcagagcaaactgccggcgttaaagccactcagacgggttggttcagcaaagataacctgccggaagagttgaacttcaagccggttgccgacgctatctttaacggcggtctggtaggtgaaaacggcgcgccgggcatcaactctgacatcatcaccgtagacggcgaccgcgcattcgtgctgcgcatcagcgagcacaaaccggaagcggtgaaaccgttggcagatgttcaggaacaagttaaggcattggttcagcacaacaaagctgaacaacaggcgaaagtggatgctgagaaactgctggttgatttgaaagccggcaaaggtgcggaagctatgcaggctgccggtctgaaatttggcgagccgaaaaccttaagccgttccggtcgtgacccgattagccaggcggcgtttgcactgccactgccagcgaaagacaaaccgagctacggtatggcgaccgatatgcaaggtaatgtggttctgctggcgctggatgaagtgaaacaaggttcaatgccggaagatcagaaaaaagcgatggtgcagggtatcacccagaacaacgcacaaatcgtctttgaagctctgatgagtaacctgcgtaaagaggcgaaaatcaaaattggcgatgcgctggaacagcaataatcctgaagccgcctcgcaaaaaaatgcgttgcagctgtaacaagaaaaggtcgctttcgcggccttttccatttctgaacattgccatttgtttactgttttcactgccgttaaggtgattccactgttaacaaacaaggagaaaacagtatgaaacacggaattaaagcactgctcattaccctgtctctggcttgtgccggaatgtctcatagcgcgctggcggcagctcctgcggcgaaaccgacaacggtagaaaccaaagcggaagctcctgcagcacaaagtaaagcagcagtaccggcgaaagccagtgacgaagaaggcacccgggtcagcattaataatgccagcgcggaagagctagcccgcgcgatgaatggcgttggcctgaagaaagcgcaggcgattgtcagttatcgcgaagagtacggtccgtttaaaacggtggaggatctaaagcaggtgccggggatgggcaattcgctggtggaacgtaatctggcggtattaaccctgtaattaatttgcatagtggcaattttttgccagactgaagaggtcataccagttatgacctctgtacttataacaacaacgtaaggttattgcgctatgcaaacacaaatcaaagttcgtggatatcatctcgacgtttaccagcacgtcaacaacgcccgctaccttgaatttctcgaagaagcccgctgggatgggttggaaaatagcgacagttttcagtggatgacggcccataacatcgccttcgtcgtggtcaatatcaatattaactatcgtcgcccagcggtattaagtgacctgttaactattaccagtcagttgcagcaattaaacggtaaaagcggcatcttaagccaggtcattacactggagccggaagggcaggtggtagcggatgcgcttattacgtttgtttgtattgatcttaaaacgcagaaagcattagctctggaaggggaattgcgcgaaaagctggagcagatggttaagtaaacgttttgtggtgccggatgctcaagccgcatccggcgacacccggaataattacctcaacccggttttctgcttcatcgctgccatcaccgtcggtttatcggccagataatgattcaaaccgttggcgcgtaaattacatgccgcacaatgaccgcaaccgtcgcctttaatgccgttatagcaggtcaacgtttcgttacggactaaatccagtttgccgtaataatctgccagcgcccaggtttccgctttatcaatccacatcagcggcgtttcaaaacgaatatctttcgccatgcccaaactgacggcatggtttagtgctttcacaaactcatcgcggcaatccgggtagccggagaaatccgtttcacagacgccggtaattacggcttctgcttttacctgatacgcatatattgccgccagcgtcaggaacaaaatattacgccctgggacaaacgtattcgggatgccatcggcttcaggttcataatcaggcaccggaatgctgtcacgtgtcaggctgctgaccgccagctcgttgagcagcgttacatcaagaaccttatgcgcgcgtgctcccagtttcagcgccagttcgcgtgccacgtcgatttctgcgcgatgtcgctgaccgtaatcgaacgtcacgcaatggacttcatcatattgttgtaatgcctgcaccagacaggtggtggaatcctggcctccactgaacacaacgacagcacgtttcatagataatcctgcttgaacaataaaagcgttatggtaacgcctgcgattaacccggaccagctattcattgcgacggcgcgggaagccaggcttcggtaaattcaaaccagccgcgcggtgtcagtcgcacaccgttcacgccgggaggggcactaatgcgatagtgatagttgaactgcggcgtcagcgtcgcgtctgccattaactggctaaaaaccgctttcagggcattaaatcggttttcctcatcaggcattacttgcaccgcgtccagcgtcgattgcagatgtgcatatgctggagcgtcgaaaacatgtggccatagtggatcgcaacgtagccattgctccagagtatattccggtgcttcgccaattaatctgtcgcccatcatgaggtctgcgtgtgccagtagggtcgtgtcgtcccagttttttgcgttatgaaaaataattgtgagttcacagccttccgctgccagtgtcgcctgtaggcgttctgccatggtatgaagttctatcggtaagtgataaaccagcgtcaaggttttcggtagtttgacttcatccggtacttgccagtgcggaatagtccagcctggcagtaatgcatgactggcggtgatcaggttttctccgacttctaacgtttgtaataaaccggattgatgaataatggagatcacttttcgcgcctgccagagggagagtcggggacttttgcgcaacgttaaatagcaaaaacctaaactgatgccactactgacctggctgacccgttgcagctcctccggtttgccgatggtgatttgcacgggatgccgacaactggttcccaaatctttttcgaaaagcggcggagttatccagtactcaaccgctttaagcagcggatgacgcaaatggtaataatcatggctctccaggcgcaccagctccgctgtgaattgtgttaagcgaaaaggaccagtgccgatcagtgggaattgcggatgcgccagatggctgcaatagctcgccagccggtgcgcaagccagtaatcggggcgatgtaaaaagaaggtcagacactgcggatgggtgacttcaatacgcttcacgctaataaataattgatccagtgctggcagttgtaacagcatcaataatcgctggtgtaagtgtgaggcttttactgcatcgccgttatgccagtgtagggttgaacgaagataaaagtcccagcgtaacccgtcagtagaggtttcccagtgatgcgctaaatcgccaatcgggcgctgagtattattatcgaagcgggtcaggccggaaaatatctgcccggcgagatgctgctcggcacggccgggcaaaaagcctggttgtagcggttcgagcgggcgatagtagggaatacgcaacgtgggtgtatcgttttgccattgtccgcccataaacggctgtaacagagtgcgcagctcacctggggccagttgcgccagctccagcacatcttgctgctttccggtttccagtgcctgttccatcatcgcattgcgtagcgattccggcgtgaccagaaagcgtaattgtccgcgctttccgcgtcctgactgcgcctgccactccagccatcccgcctcctgtgcctgacgcaacagcgtacgaacatggcgttcgctgcaaaaacagcgttcggccagttcgctgacggtgacggtttgcggctttccggctgaaggttgccacagacgttgatactggttaagacggttgagcaatcgcatataaacccggaacaatattatttaactattcactattacttccgtatatatcaggtgatactcaatcaccattaaccgtgtcacagagtggagaaagaaatggctcgtctggcagcgtttgatatggatggcactttattgatgcctgaccatcatttaggtgagaaaaccctctctactttggcgcgactgcgtgaacgcgacattaccctcacttttgccacggggcgtcatgcgctggagatgcagcatattctcggggcgctatcgctggatgcatatttgattaccggcaacggaacgcgcgtgcattctctggaaggtgaacttttacatcgtgatgatttacctgcggatgtcgcggagctggtgctgtatcagcaatgggatacccgagccagcatgcatatcttcaatgacgacggttggtttaccgggaaagagatccctgcgttgttgcaggcatttgtctatagcggttttcgttatcagataattgatgtcaaaaaaatgccactaggcagcgtcaacaagaactgcttctgtggcgatcacgacgatcttacacgcttgcagatccagctatacgaagcattaggcgagcgtgcacatttgtgtttttccgccacggattgcctcgaagtgctgccggtgggctgcaataaaggcgctgcattgacggtgctgacccaacatttaggtttatcgttgcgcgattgcatggcctttggtgatgcgatgaacgatcgcgaaatgttaggcagcgtcggtagcggctttattatgggcaatgcgatgccgcaactgcgcgcggagctcccgcatttaccggtgattggacattgccgaaatcaggctgtctctcactatttgacgcactggctggactatccacatctaccttattcccccgaataacgagatcccttccagcaccgggcaattgcccggttttttttgcgttgaatttgtcattttgtgccgtggtgtttaaaccgcacagaataaattgtcgcgatttcacctttaaaatagaattaaaagagaaaaaaattctccgtggaagggctatgttagataaaattgaccgtaagctgctggccttactgcagcaggattgcaccctctctttgcaggcactggctgaagccgttaatctgacaaccaccccttgctggaagcgcctgaaacggctggaggacgacggtatccttatcggcaaagtcgccctgctggatccggaaaaaataggcctcggcctgaccgcctttgtgctgataaaaacgcaacatcacagcagcgaatggtattgccgctttgtcacggtggttaccgaaatgccagaagtgctggggttctggcgcatggctggtgaatacgattatctgatgcgcgtccaggttgccgacatgaaacgctacgacgagttttataagcgtctggtaaacagcgtgccggggctgtcggacgtcacttccagcttcgcgatggaacagattaaatacaccacttctttacccatcgaataaatatccagaatcaggtcaggacacaacgcgtgcgattatttgctcaattaagctggtatttccgtcgggaatggcgtcgctatctcggggctgtcgccttgcttgtcattatcgcgatgctgcaactggttccgccaaaagtggttggtattgttgtcgatggcgtgacagaacaacactttactaccgggcagatcctgatgtggatcgccaccatggtgctgattgccgttgtggtttatctcctgcgttacgtctggcgggtattgctgtttggtgcgtcttatcaactggctgttgaactgcgtgaagattattaccgtcagctaagccggcagcatcctgagttttacctgcgtcatcgcacgggtgacctcatggctcgtgcgactaatgacgtcgatcgcgtcgtgtttgccgccggagaaggggtgctgacgctggtggattcactggtaatgggctgcgctgtgttgattatgatgtctacgcaaattagctggcagttgaccttatttgccctgttaccgatgccagtgatggcgatcatgattaagcgcaacggcgatgccttgcatgaacgctttaagctggcacaggcggcgttttctagtcttaatgaccgcacccaggaaagcctcaccagtattcgcatgatcaaagcctttggtctggaagatcgccagtcggcgttatttgccgcggatgccgaagataccggcaaaaaaaacatgcgggtggcgcgtattgatgctcgtttcgacccgaccatctatatcgcgattggtatggcgaacttgctggcgattggcggcggtagttggatggtggtgcagggcagtttaacgctgggccagctcaccagttttatgatgtatttaggtctgatgatttggccaatgctggcgctggcatggatgtttaacattgtggaacgtggtagtgctgcgtacagccgtattcgcgcgatgctggcggaagcgccggtggtgaacgatggtagcgaacccgtgccggaagggcgtggcgaactggatgtaaatattcaccagttcacgtatccgcagactgaccatcctgcgctggaaaacgtcaatttcgccctgaaacccggtcagatgctgggtatttgcgggccgactggttccggcaaaagtaccctgttgtcgctcattcagcgtcatttcgacgtcagcgagggggatattcgctttcatgatattcctctgacgaagttacaactcgatagctggcgtagccgcctggcggtggtcagccagacgccattccttttttctgacaccgtggcgaataacatcgcgctgggttgcccgaatgccacccagcaagagattgaacacgtagcgcggttagccagcgtacatgacgatattttgcgtctgccgcaaggttacgatacagaagtgggcgagcgcggcgtgatgctttccggtgggcaaaaacagcgtatctccattgctcgagcgttattagtcaacgcggaaatcctcatccttgatgatgcgctttcggcggtggacggacgcacagagcaccagatcctgcataacctgcgtcagtggggacagggaagaacggtaatcatcagtgcccatcgcctttcggcactgacggaagccagtgaaattattgtgatgcagcacggacatatcgcccagcgtggcaatcatgatgagctggcgcaacaaagcggctggtatcgcgatatgtatcgctatcaacaactggaggcggcgctcgacgacgttccggaaattcgcgaggaggccgtcgatgcgtagttttagccaactgtggccgactctcaagcgtctgttagcgtacggttcgccgtggcggaaaccgctggggattgcggtcctgatgatgtgnnnnnnnnnnagtcagtgggccgctgcttatcagctattttatcgacaatatggtagcgaaaaataacctgccgttgaaaatggttgcagggctggcggcggcgtatgttgggctacaactgtttgccgccgggctacattacgcgcagtcgctgctgtttaatcgggcggcagtaggcgtagtgcaacagttgcgtaccgacgtgatggatgctgcgttacgccagccattaagcgagtttgatacccaacccgtcgggcaggtgatttcccgcgtcactaatgacactgaagtgatccgcgatctctacgttaccgtagtggcaactgtcctgcgtagcgccgcactggtgggcgcgatgctggtggcaatgttcagcctcgactggcgaatggcgctggtggcgataatgattttcccggtagtgctggtggtaatggtgatatatcaacgttacagcacgccgattgtccgtcgtgtgcgcgcctatctggcggatatcaacgacggctttaacgaaatcatcaatggcatgagcgttatccagcagttccgtcagcaggcgcgatttggcgaacgtatgggtgaggccagtcgttcacactatatggcgaggatgcaaaccctgcgcctcgacggttttctgctgcgtccgctgctgagtctgttttcatcgctcattctttgtggcttgttgatgctgtttggcttctccgccagcggcaccattgaagtgggcgtgttatatgcgtttatcagctatcttgggcgacttaacgaacccttaatcgaactgaccacgcagcaggcgatgctgcaacaggctgttgttgctggtgagcgcgtgtttgaactgatggacggaccgcgccagcaatatggcaatgatgatcgcccgttacagagcggcaccatcgaagtcgataacgtgtcatttgcttatcgcgatgacaatctggtgctaaagaacattaatctctctgtgccttcgcgtaactttgtggcgctggtcgggcataccggcagtggcaaaagcaccctcgccagtttattgatgggctattacccgctaacggaaggtgagattcgccttgatggtcgtccattaagttcgctaagtcacagcgcgctgcgccagggcgtggcaatggtgcagcaagatccggtggtgctggcggataccttcctcgccaacgtgacgctgggacgtgatatctccgaagaacgcgtctggcaggcgctggaaaccgtgcaactggcggagctggcgcgcagcatgagtgatggtatttatacgccgctgggcgagcagggaaataatctctcagtcgggcaaaagcaactgctggcactggcgcgcgtgctggtggagacgccgcaaatcctgatccttgatgaggcaaccgccagcattgactccggtactgaacaggcgattcaacatgctctggcggcggtgcgtgaacataccacgctggtggtgattgctcaccgcttatcaactattgttgatgccgacaccattctggtgcttcatcgtggacaagccgtggagcagggcactcaccagcaactgctggcggcccagggacgctactggcagatgtatcaactgcaacttgcgggcgaagagctggcagccagcgtgcgtgaagaggaatcattgagcgcctgaatagcgcaatatttcatcgttggtgcaaaaatgtaacgcactgtgcactgtcatagtgcgttttcattttcaatcttcttaacttcctgctctctttctcatttttcatttctggcacaccgcttgcaatatcttcttcgtgtagcagaaccattactgaattctgaccggaggggatctatgaagctggtgaccgtgataatcaaaccattcaagctggaagacgttcgtgaagcgttatcttccattggtattcagggcctgaccgtcaccgaagtgaaaggtttcgggcgtcagaaagggcatgccgagctgtaccggggggcggaatacagcgtcaacttcctgccaaaagtaaaaattgatgtggcgattgctgatgaccaactcgatgaagtgatcgatatcgtcagtaaggcggcttacaccggaaaaattggcgacggcaaaatcttcgtcgctgaattgcaacgcgtcattcgtattcgtaccggcgaagccgacgaagcggcgctgtaatctctggcacacagcaacaggaacgaaaaatgaagatagcgacgataaaaactgggcttgcttcactggcgatgctgccgggactggtaatggctgcacctgcggtggccgataaagccgacaatgcgtttatgatgatttgtactgcgctggtgctgtttatgactattccggggattgccctgttttacggtgggttgattcgcggcaaaaacgtgctgtcgatgctgacgcaggtgacggtgacgtttgcactggtctgtattctctgggtggtttacggttactcgctggcgtttggtgagggcaacaacttcttcggcaacattaactggttgatgctaaaaaacatcgaactgacggcggtgatgggcagcatttatcagtatatccacgtggcgtttcagggctcgtttgcctgcattaccgtcggcttgatcgttggggcgctggcggaacgaatccgcttctcagctgtgttgattttcgtggtggtatggctgacgctctcttacattccgattgcgcatatggtgtggggcggtggtttgctggcttctcacggtgcgctggatttcgcgggtggcacggtggtgcatattaacgccgcaatcgccggtctggtgggcgcgtatctgataggcaaacgcgtgggcttcggcaaagaggcgtttaaaccgcacaacctgccaatggtcttcaccggtactgccattctctatattggttggtttggctttaacgccgggtcagcgggcacggcgaatgaaatcgcggcactggcatttgtgaatactgtggtcgcaacggcggcggcaattcttggctggatcttcggtgaatgggcgctgcgtggtaagccttctctgctgggagcgtgttctggcgcgattgccggtctggtcggcgtgacgccagcgtgtggctacattggggttggcggcgcgttgattatcggcgtggtagctggtctggcgggcttgtggggcgttactatgctcaaacgcttgctgcgggtggatgatccctgcgatgtcttcggtgtgcacggcgtttgtggcattgtcggctgtatcatgactgggatttttgccgccagttcgctgggtggcgtgggcttcgctgaaggtgtgacgatgggccatcagttgctggtacagctggaaagcatcgccattacgatcgtctggtccggtgtggtggcatttattggctacaaactggcggatctgacggttggcctacgtgtgccggaagaacaagagcgagaagggctggacgtcaacagccacggcgagaatgcctataacgcgtaacaagcactgcaaaaaatagccggacggttttcacctccggctatttttttaattgtgattacgcattaccccttcctgaacggtcgaggcaaccagcacgccgtcctgggtataaaactcaccgcgcacaaagccgcgtgcgctggacgccgaggtgctctccacgctatacagcagccattcattcaaattaaacgggcgatggaaccacatggaatggtcaatggtggcaatctgaatccctggttcgagaaaaccgatgccgtgcggctgtagagctaccggcaggaagttaagatcagaagcgtaaccgagcagatactgatgaacgcgcaggtcatccggcacgctaccatttgcgcggatccacacctgacgatgtggttctgcgacgtgacctttcagtgggttatgaaactccaccggacggacttccagcggacgatcgcagatgaatttatctttaagcactggcggcagcaggtgcgccagcgattgggcgatttgcgtttccgaaggcaggccatcaggcgctggcgcggacggcattgttttttgatgttcgaaacccgcttctggtgcctggaaagaggccgtcatataaaaaatcggtttgccgttttgaatagcagcaacccggcgggcgctgaagctgttaccgtcacgcagcgtttcgacatcataaataatcggcttcttactatcgccagggcgaagaaagtagctgtgaaacgaatgtaccagccgctcttcagggacggtctcttttgcagcatacaaggcctgacccacgacctggccgccaaacacctggcgtaaacctaaatcttcactctggccgcgaaagagtccttcctcaattttttctagatttaacaatgtcagtaaattttttagcgcctgactcatataactctccagtaacaaagctgccgcagcaagccaaagtgagttgagtataacgcaaatttgccactggtccgatgggtgcaatggtctgaattacgggctaattacaggcagaaatgcgtgatgtgtgccacacttgttgacgttactattttgttnnnnnnnnnnccactcttccggcgaggaaagttagcccgctggtgcattgataataaggagaaatgaatgaaactcgtgcacatggccagtggtttagcggttgcgattgcattggcggcttgcgcagataaaagcgcggatattcagacgccagccccggctgcaaatacgtctatttcagcaacacaacaacctgctatccagcaaccgaatgtctccggtaccgtctggatccgtcagaaagtcgcactgccgcctgatgctgtgctgaccgtgacactttctgacgcgtcgttagccgatgcaccgtcaaaagtgctggcgcagaaagcggtgcgtaccgaaggtaaacagtcaccattcagctttgttctgccatttaacccggcagatgttcagccgaacgcgcgtattctgttgagtgcggcgattaccgtgaatgacaaactggtatttatcaccgataccgttcagccggtgatcaaccagggcggaactaaagccgacctgacattggtgccggtacagcaaaccgccgtgccggttcaggccagcggtggcgcaacgactaccgtaccttcgacttcaccaactcaggtgaatccgtcttcggcagttccagctcctacgcaatattaagcgacgttaaccctctccgcccggagagggttagtagttccagcgataacgctgcaagtcgatttgcccgcttcccgataccattacaccttctgccagtaatgcctgtcgctgacgctgtaaatccggtccggttagcgaaattgtgccgtggcgattaaccacccggtgccagggtaaggtgctgccttcagggagacgctttaacacaccgcccacctggcgcgcggcgcggggcgatcccgccagtttcgccacatcaccgtaagtggtgacatagccttcgggaatagcggcgacgatttgccagacgcgttggggaaatgaatcttctttttccatctttttttcctgaggtaatttttcagcataatctggaaaaacgcccgagtgaagtcgcattgcgcaagaaaccagcatctggcacgcgatgggttgcaattagccggggcagcagtgataatgcgcctgcgcgttggttctcaacgctctcaatgggggctctgttggttctcccgcaacgctactctgtttaccaggtcaggtccggaaggaagcagccaaggcagatgacgcgtgtgccgggatgtagctggcagggcccccacccatttctgcctcccaccgtttcgtcaaaaaaacccaacatggctaaactttaaccacaactgacgtcgcaagaattgtctggctgcgcagtacgcttcggaggtatgtctgatgaagtatgttgatggttttgtggttgccgttcctgccgataaaaaggatgcctatcgggaaatggccgctaaggctgcgccattgtttaaagagtttggcgcgcttcgtattgtcgaatgctgggccagcgatgtaccggatggcaaagtgaccgattttcgtatggcggtgaaagcggaagagaatgaagaggttgtctttagctggattgaatacccttcaaaagaggtccgcgacgctgctaatcaaaagatgatgtcggacccacggatgaaagagttcggcgagtccatgccgtttgacggcaagcgaatgatctatggcggattcgagtcaatcatcgacgaataggtagcgtgacgggctgtgcggcgtgccgtcagcccaaaaattcacaaatgttgctcggcccagcgtaagaaatcttctttcggtaatgccttgctgtagagccagccctgaccgtagtgcacgccatgctggcgtagccactcttcttgtttactggtttcgattccctccgctaccattttcagtttcagtgtttttgccatttcgatgatatgcggcgtgacatttttatattccagcgcatcaacgaaagatttatcgatcttcagaatgtcgacatccagatcctgtaaataacttaaacttgaatatcccgtaccaaaatcatcaagataaatttcatggcccgcctcccggtagcgagaaattatcggggcgctggttttcggatcggcaaactcgcgttcagtgagttcaagcgcgatctgtctgggattaacctgatagtgattgatcatttcacgcagcaattgcgggattttttccgaggtgagcacggtggattcaagattgatcgaaatatgctgctgtggatgctgacgcagccagtcgcccatatcttcaaagacgcttcttataatcagtagcgtcaatggctcagaaaggcccgtttgctgtgccagcggaataaaactatctggtgacaaccaactaccgtctgtctgcggccagcgcgccagtgcctcagcaccgacaattttgccattggctaaggagacaatcggctgatagtgcacgcaaatatcacgattttcgatagcatcctgcagccgatgatgcggtgactggatacggcgcaaaatacgcagcacaaacatcgctgccagcaggccaatcaccaacccgagcggtaaccaaataaagacttgccgatgccagcctttctgcaacattttcgttgaagcccaggtgatgatcgaaatattcatctccgggaagggcaggatatcgtaaatgattccattattttcgatatgctcaccgggtgttttttgtagcctggtaataattccctgagcaatttcatcgctgctggttatgacaacgttatgggcattgccaataatggcggcatcaatttgccatgagctatagggaatgacatcaataaaggaagcggggtcgatcatgacgacataatgtgccgttcccatggcgaccatgtaacggataatgcctaaatcgttatgcgatgttaaccagacacgataaccatctttcgaaattttacctggctcggggaaggtatcgggcggactttcatgctccagagacgaacactggggaacgttgttatcgatataaaccacttcctgaatatagcgataactgtaagatacccgacgcatttccatgagatgggcttcgctacaggcagcgccttgccatctttccagctcttgcagcgcatctttcccttgtgtcgccaccttattggcccgaatagcgacgcgggaggaataggtatccagctcttcaataaacgatgtttctacctgctgatgggccagccagatgcttaagccgacaggcagcaatactgaaagaatcaggactcccgaaataaggccgaccagatgtcgtgttctcaccagcatatccttattaacacagtgtaggga

SEQ ID NO: 227 - DNA, 22902 bp, Escherichia coli
  source 1..22902: mol_type = genomic DNA
ctatataacattgcatgtaaagcatatacacctcattattttgtcattattaagttattaacagcacaatcgagccttcccctctggcaaaatcttattctgcagaccttcaaaacaccgtcctgggggagtacattgttctaagctgacttccacggcagggagtggcgataacagcaaaaaaggtcaagattcatgtcccccattgaaaaatccagcaaattagagaatgtctgttatgacatccgtggtccggtgctgaaagaagcaaaacgcctggaagaagaaggtaacaaggtactgaaactgaacatcggcaacccagccccgttcggttttgacgcgccagatgaaatcctcgttgacgtgatacgcaacctgcctaccgctcaagggtattgcgattccaaaggtctttactccgcgcgtaaagccatcatgcagcactaccaggctcgtggcatgcgtgatgttaccgtggaagatatttacatcggcaatggtgtatcggagcttatcgttcaggcaatgcaggcattgctgaacagcggggacgaaatgttggttcctgcaccagattacccactatggaccgcggcggtttcgctttccagcggtaaagcggtgcattatctttgcgatgaatcctctgactggttcccggacctcgatgatattcgcgctaaaattacgcctcgtacgcgtgggatcgttattatcaacccaaataacccaaccggcgcggtatattccaaagagcttttaatggagattgtggagattgcacgtcagcataatctcattatcttcgccgatgaaatttatgacaaaattctttacgacgacgctgagcatcactcaattgcgccgctggcacctgacctgctgaccattacctttaacggactgtcgaaaacgtaccgcgttgcaggcttccgtcaggggtggatggtgttgaacgggccgaaaaaacacgccaaaggctacatcgaaggtctggaaatgctggcttcaatgcgcctgtgtgctaacgttcctgcgcaacacgccattcagaccgcgctgggtggttatcagagcatcagtgaatttattacccctggcggtcgtctttatgagcagcgtaaccgcgcgtgggaactgatcaacgatattccgggcgtttcctgcgtgaaacctcgtggtgcgctgtatatgttcccgaaaatcgacgccaaacgctttaacattcacgacgatcagaaaatggtgctggatttcctgttgcaggaaaaagttctgttggtgcaagggacggcattcaactggccgtggccggatcacttccgcattgtcacgctaccgcgtgtcgatgatatcgagctgtctttgagcaagttcgcgcgtttcctttctggttatcatcagctgtaatcttaatttcactgccggagattgcatccggcagcgttatcccgccacaatgacctgatgatgtcatcatacgtaaggtcactatgaaacagagccatttttttgcccatctctcccgcctgaaactcattaaccgctggccgctcatgcgcaacgtgcggacggaaaatgtgtccgaacacagtttgcaggtagcgatggtcgcccatgcgctggcaactatcaaaaatcggaaatttggcggtaatgtcaacgccgaacgtatcgctttactggcgatgtaccacgatgcctcagaagtgctcaccggcgatctccctactccggtgaaatacttcaattcgcaaatcgctcaggagtacaaggctattgaaaaaatcgctcagcaaaaactggtcgatatggttccggaagagctgcgggatatctttgcgccgttaattgacgagcatgcatatagcgatgaagaaaaatcgctggtgaaacaggcagatgcactgtgtgcatatctgaaatgtctggaagaactcgcggccggaaataatgaattcttgctggcaaaaacgcgactggaagcgacgcttgaagcgcgtcgcagccaggagatggactacttcatggaagtatttgttcccagcttccatctttcgctcgatgagattagccaggattcaccgctgtaagcagccggagtctgcgtcgcatcaggcaataagcgccggatgcgacatcaggctcttgtcaaaacggaaacagcatcgggatcatcaccacacaaaccgccatcacgataatggtgaacggtacccccaacttcacaaagtcactgaagctgtaatttcccggacctaaaaccagtgtgttaacaggtgaagaaaccggtgtcataaaggcggcggatgctgccatcgccacgaccatcgcgaatggataaggcgacacccccatcgttttggcagcagccagcgcaatcggagccatcaacaccgccgtcgcggtattagagataaatagcccaataaccgccgacaagacaaacaaacaacccagcatcatatgtggcccgtaaccaccgccaatgtccatcagccctttcaccgccagcgcgacacctcccgttttctgtaatgccacagcaaacggcatcatcccaacgatcaaaataatgctcggccagtgaatggatttataggcgctttcagcatctatacagcggaatttccccatcagcaggcaggcgatgatagcggcaacaggattaggaatttcatctgtcagcattaacgccaccattagcaccagacagaaaatggcatggggtgcctggctgtgcgcgggcgatgcttcactcacctcttccggtaagttcagcgctacgaagtcgcggccctgtttggccagcataccgatcagtttccagttacccacaaccaggatgatatcgcccagcagcagaggctcatccgccagcgaaccttccagcgccacgccattgcgctttagccccaccacattcagtccgtagcgggtacgaaaaccaatttcgcgcaccgatttaccaatcagttctgactcaggaattaatgaaatctctgccatgcccacatcaagggcctggtcagaaaaatactcgccgcgcagtaccatcggctccagcaattgctcactacaaaattgccggagatcgacatcagccgcagacatatcaataagcaaaacgtcacgcgcgcgaaattcagaaaccccattaacgttcacgataacgcgacgaaaacgccgccagcgttcaacaccgatgacgttagcgccataacgctcacgtaatttgagatcatccagccgttgacctatcattggcgatccggggcgaatagccagacgtcgcgcacgcccggtcagtcgatattcacggataagatcgcgaaaggttcgacgcgtccagccttcgcgctgcggggtctgggtatcccctttcagcatgaaacgcatcactaacatatacaaaatacccagcaccagcacgaccaggccaataggtgttacgctaaagaaactgaagccgtgatagccttcacgcagcaattcactgttgactaccaggttcggcggcgtcgccaccagcgtcatcatgccgcttatcagcccggcaaaactcaacggcatcatcagacgtgacggcgaagtttgcatacgcatggcaacgcttaacaccacgggaataaagatagcgacaacgccggttgaactcataaacgcgccaagccccgcgacggtcagcatcaacaaaaccaacattttgatttcactgttgcccgcaactttgaccagccatgttcccattacggtggcaacaccggtacggaccaaaccatcgccaataataaacaaggcggcaatcaggacaacgttaggatcagaaaagccggaaaatacttcggggactgtcagcgttccgcttaatgcaaacgcgacaataacaaacaaagcgaccgcatccatacgcactctgcccgtcgcaaacaagacaatggcaacggccagtaatgaaagaacccaaatcaattcaccgttcacaacttatccttgttaattgagggagatgtcttgattctgccataaaaaagccccgacgagacggggctaaatcatgatcaggtgtttcactgaataataacatcgccatttggctgtttggtcacagtaatttgctccagactgtggaggaccaaatcgacctcattcaggcgcggggtatctgccggagcgttaaccgcaatgacatggcaacccgccgccaggccagaaagcacgccagcgggagcatcttccaccaccacacactcctgcggcgcaagccccagcagctgcgcacctaacagatacgcatcaggttctggttttccgcgcttcactcgctcagcggttacaaacacctctggtgcgggaagcccagctattttatggcgcgctcgcgctaccggcatggagccagaagtcacaatggcccacggaatacctgctttattcaaatgactgagtaaggcgattgcccccggaagcgcggtaataccttcggtttccgtggcctcgatttgctccagacgcgtaaactcggcggcaatatcagcctcggatttgcccgccataaaatggcgcagagaggtgatcgcctgtttaccgtgaatgaaagccagcacctcttccggcgctaacccatgacgtctggcccagttgctccacgcccgttctaccgcaggcagggaatccaccagcgttccatcaagatcaaacagaaaacctttgcaccgcacgcgggcctcctcaggcgttgataatttgattaatttcgttggcgctcaaatggtactgacgcgggcaggcatgccacacattaagcatgcgctgatatttttcccacattggcgtctgggcgttaaaaccgtgagttccggcgtcaaaatgggtatagcgcccttccacattaaccataaagcggacataaccgaggtaacgtgcttcagtggcggcgtcaaagccgaggaaggtgacacgacgttcatcgatggattgctggtcctgcaaattagaccaggaaacatgcaacgcatgatacatctccataatgtcgatgatagtgcggcaggtttcttctttcagctcgccaaactcgcgatccaattcacgcatctgtaatccgtaaccacgctcaataattgtttgcaggcgacggtaacgttcagcatttgccggatcgagcatagtcatcatcttgtactgattagacaaaataagacgttgcgcgttggtcatttccattgttgactcctgtatcactatactacggtgaaaaaaaagaaggctgagtatgccttcttttatatgcgtaatcaggggtcaattacaaatcatcaaggaaagttttatccagttgtttgaaggcgcgcttaagcgtgtcagctaatgcctggtaatcaggcttgccttcaacgggtgccaacacctgtccagactcctgcaatttaccgcgaacttcataaaaccagttaaggattgcagggggtaatggcgttacagaacgcttgcccagccaccacaatccctgcatgggtaaacttaaggcgaacagcgcagtggcaactgccggcccaagctgaccgcccagggcaatctgccagcagagagtaaatacggcgatcggcggcataaaacggatcgcataacgcgtcatcttgataacgcgattttcgacaaagaccggggcaaggcgtttttccagtggccacgtctttgagtaatgctgtccgcggcgaaacaagctaaaaaaattaacagaacgattatccggcgttgacatgcttcacctcaacttcacatataaagattcaaaaatttgtgcaaattcacaactcagcgggacaacgttcaaaacattttgtcttccatacccactatcaggtatcctttagcagcctgaaggcctaagtagtacatattcattgagtcgtcaaattcatatacattatgccattggctgaaaattacgcaaaatggcatagactcaagatatttcttccatcatgcaaaaaaaatttgcagtgcatgatgttaatcataaatgtcggtgtcatcatgcgctacgctctatggctcactgacgtttttttagccacgtatcaattataggtacttccatgtcgagtaagttagtactggttctgaactgcggtagttcttcactgaaatttgccatcatcgatgcagtaaatggtgaagagtacctttctggtttagccgaatgtttccacctgcccgaagcacgtatcaaatggaaaatggacggtaataaacaggaagcggctttaggtgcaggcgccgctcacagcgaagcgctcaactttatcgttaatactattctggcacaaaaaccagaactgtctgcgcagctgactgctatcggtcaccgtatcgtacacggcggcgaaaagtataccagctccgtagtgatcgatgagtctgttattcagggtatcaaagatgcagcttcttttgcaccgctgcacaacccggctcacctgatcggtatcgaagaagctctgaaatctttcccacagctgaaagacaaaaacgttgctgtatttgacaccgcgttccaccagactatgccggaagagtcttacctctacgccctgccttacaacctgtacaaagagcacggcatccgtcgttacggcgcgcacggcaccagccacttctatgtaacccaggaagcggcaaaaatgctgaacaaaccggtagaagaactgaacatcatcacctgccacctgggcaacggtggttccgtttctgctatccgcaacggtaaatgcgttgacacctctatgggcctgaccccgctggaaggtctggtcatgggtacccgttctggtgatatcgatccggcgatcatcttccacctgcacgacaccctgggcatgagcgttgacgcaatcaacaaactgctgaccaaagagtctggcctgctgggtctgaccgaagtgaccagcgactgccgctatgttgaagacaactacgcgacgaaagaagacgcgaagcgcgcaatggacgtttactgccaccgcctggcgaaatacatcggtgcctacactgcgctgatggatggtcgtctggacgctgttgtattcactggtggtatcggtgaaaatgccgcgatggttcgtgaactgtctctgggcaaactgggcgtgctgggctttgaagttgatcatgaacgcaacctggctgcacgtttcggcaaatctggtttcatcaacaaagaaggtacccgtcctgcggtggttatcccaaccaacgaagaactggttatcgcgcaagacgcgagccgcctgactgcctgatttcacaccgccagctcagctggcggtgctgttttgtaacccgccaaatcggcggtaacgaaagaggataaaccgtgtcccgtattattatgctgatccctaccggaaccagcgtcggtctgaccagcgtcagccttggcgtgatccgtgcaatggaacgcaaaggcgttcgtctgagcgttttcaaacctatcgctcagccgcgtaccggtggcgatgcgcccgatcagactacgactatcgtgcgtgcgaactcttccaccacgacggccgctgaaccgccgaaaatgagctacgttgaaggtctgctttccagcaatcagaaagatgtgctgatggaagagatcgtcgcaaactaccacgctaacaccaaagacgctgaagtcgttctggttgaaggtctggtcccgacacgtaagcaccagtttgcccagtctctgaactacgaaatcgctaaaacgctgaatgcggaaatcgtcttcgttatgtctcagggcactgacaccccggaacagctgaaagagcgtatcgaactgacccgcaacagcttcggcggtgccaaaaacaccaacatcaccggcgttatcgttaacaaactgaacgcaccggttgatgaacagggtcgtactcgcccggatctgtccgagattttcgacgactcttccaaagctaaagtaaacaatgttgatccggcgaagctgcaagaatccagcccgctgccggttctcggcgctgtgccgtggagctttgacctgatcgcgactcgtgcgatcgatatggctcgccacctgaatgcgaccatcatcaacgaaggcgacatcaatactcgccgcgttaaatccgtcactttctgcgcacgcagcattccgcacatgctggagcacttccgtgccggttctctgctggtgacttccgcagaccgtcctgacgtgctggtggccgcttgcctggcagccatgaacggcgtagaaatcggtgccctgctgctgactggcggctacgaaatggacgcgcgcatttctaaactgtgcgaacgtgctttcgctaccggcctgccggtatttatggtgaacaccaacacctggcagacctctctgagcctgcagagcttcaacctggaagttccggttgacgatcacgaacgtatcgagaaagttcaggaatacgttgctaactacatcaacgctgactggatcgaatctctgactgccacttctgagcgcagccgtcgtctgtctccgcctgcgttccgttatcagctgactgaacttgcgcgcaaagcgggcaaacgtatcgtactgccggaaggtgacgaaccgcgtaccgttaaagcagccgctatctgtgctgaacgtggtatcgcaacttgcgtactgctgggtaatccggcagagatcaaccgtgttgcagcgtctcagggtgtagaactgggtgcagggattgaaatcgttgatccagaagtggttcgcgaaagctatgttggtcgtctggtcgaactgcgtaagaacaaaggcatgaccgaaaccgttgcccgcgaacagctggaagacaacgtggtgctcggtacgctgatgctggaacaggatgaagttgatggtctggtttccggtgctgttcacactaccgcaaacaccatccgtccgccgctgcagctgatcaaaactgcaccgggcagctccctggtatcttccgtgttcttcatgctgctgccggaacaggtttacgtttacggtgactgtgcgatcaacccggatccgaccgctgaacagctggcagaaatcgcgattcagtccgctgattccgctgcggccttcggtatcgaaccgcgcgttgctatgctctcctactccaccggtacttctggtgcaggtagcgacgtagaaaaagttcgcgaagcaactcgtctggcgcaggaaaaacgtcctgacctgatgatcgacggtccgctgcagtacgacgctgcggtaatggctgacgttgcgaaatccaaagcgccgaactctccggttgcaggtcgcgctaccgtgttcatcttcccggatctgaacaccggtaacaccacctacaaagcggtacagcgttctgccgacctgatctccatcgggccgatgctgcagggtatgcgcaagccggttaacgacctgtcccgtggcgcactggttgacgatatcgtctacaccatcgcgctgactgcgattcagtctgcacagcagcagtaatctcgtcatcatccgcagctttgcgctgcggatatctgaaccggaaataatcactatttccggttttttattctcttaatctgcattaatcctttctgattatcttgcttaactgcgctgcatcaatgaattgcgccatttcactttgcatacttaccactttgttttgtgcaagggaatatttgcgctatgtccgcaatcactgaatccaaaccaacaagaagatgggcaatgcccgatacgttggtgattatcttttttgttgctattttaaccagccttgccacctgggtagttccggtggggatgtttgacagtcaggaagtgcagtatcaggttgatggtcaaacaaaaacacgcaaagtcgtagacccacactcatttcgcattctgactaacgaagcaggcgaacctgagtatcaccgcgtacagctgttcacgacgggcgatgaacgcccgggcctgatgaacttcccgtttgaaggattaacctcaggatcgaaatacgggacagctgttggcatcatcatgtttatgctggtgattggcggcgcgtttggcattgtgatgcgtacaggaaccattgataacggtatcctggcgcttattcgccatacccgcgggaatgaaattctctttattcctgcgctgtttattctgttttcacttggcggcgcggtatttggtatgggagaagaggccgtcgcctttgccattatcatcgcaccgctaatggtccggctgggctatgacagtattaccaccgtcctggtgacctatattgccacgcaaatcggttttgccagttcgtggatgaacccgttttgtgtggtcgttgctcaggggatttccggcgttccggtgctttctggctccgggttgcgcatcgtggtgtgggttatcgccactctgattggcctgatctttaccatggtgtacgcctcacgagtgaaaaagaatcctcttctgtcacgcgtgcatgagtccgaccgcttctttcgtgaaaagcaggctgatgttgaacaacgtccgtttacctttggtgactggctggtattgattgtcctgaccgccgtaatggtctgggtgatttggggcgtgatcgttaatgcctggtttattccagaaattgccagccagttcttcaccatgggtctggtgattggcatcatcggcgttgttttccgccttaacggcatgacggttaataccatggcttcatcctttaccgaaggggcgcgaatgatgatcgcccctgccctgctggtgggtttcgccaaagggattttgctgctggtcggtaatggtgaagcaggtgatgccagcgtgttaaataccatcctcaacagcattgccaatgccattagcggtctggacaacgctgtcgcggcctggtttatgttgctcttccaggcggtatttaatttctttgtgacatccggttctggtcaggcggcgttaaccatgccgttactggcaccgcttggcgatctggtcggtgttaaccgtcaggttaccgtgctggcattccagtttggtgatggcttcagccacatcatttacccaacctcagcttcgttaatggcgacgctcggtgtttgccgggtggacttccgtaactggctgaaggtgggcgcgacactgcttggactgctgtttattatgtccagcgtcgtggtgatcggcgctcagttgatgggctaccactaaaaatgttaagagccgcaattgcggctcttttttcattctgccgtttcagtctctacggcttcatttttggcattgcgcttcatccacaacgccagcgctttcagcgagtctggagtgaactcatcgcagcgtgcggtgatttcttccggcgtcagccagcaaacttcactgacttcatcttcctgtagggcgaagggaccgtgagagacgcagctgaacaatgcgccccagacacggcaatttttatcttcgaaatagaactgcccgtgctcagcaaaggggacaccggcaatgcccaactcttcttccgcttcgcgacgcgcggattccagcagttgctcatcggcctggaccacaccgcctgcggtcgcatctaacatgccgggtaaaaagtcttttgtctcggtacgacgctggaccagaattttgcccatgccatcatgcacgacgatgtaagttgcacgatgacgcagacactgtgcccgcatttgttcccggctggcttgtgcaatgacttcgttctcttcattgacaatatccacccattcagtacttgccaatcgacgctgttccattatcaggaaaccttctttttctggcgctcttacggcgcattttgagttgtgggtaaattacggattaatcgcgacctgcgcaatgatactttgatcattgagtgcgattacactaagtacgtcattatccagcatgccataactcgccggattaccgcctttcggaatactcaccgagccggggttgaagtggaaaatctccccccgctgttctgccactggcagatgggtatgaccgtacaccagcacatcgttctggtttaaagcaggtagattttccgggccaaaaagatgaccatgcgtcaaaaacagacgttgtttttccagtaatacctgttgccacggcgcggttatcgggaaatgcagcagcatttgatccacttcgctgtcgcagttgccgcgcacagcgataaccttatgtgccacttcattaagccgttcagcgactttggctggcgcgtaaccctccggtaaagcattacgcgggccgtgattcaacacgtcgccaaggatcaccagccactgggcaccgctttgggcaaacaactccagaacacgttccgtcgccggtaacgacccatgaatgtccgatgcaaacatcagtttcatcactcactcctcgtcgaaaaaacgtaagctatgatactggattctgtcgttgctatcagccagattgcttcgccgaaagtgcaataaaacgctggacagacgctcgctgccactggaatgtcgcataatccaccaggcgttctggcacctcatcgccatgtagtaccaggcggttaatcattagcgccagatcagtatcagcaatgcaccattcaccaaataaattcggctgacccagtgctaacaaatgttctgccatcgcgaacagtttctctgcactggcttttacctcggccgttagtggcgcttttttcgcccccgcaaagacaacatccgtcggacgctcttcgcggatgggcatcagatcgctgcgcagccaggcctgaatctgtcgtgcacgcgcacgattttctaaatcaagcggataaatacgttcccaggtcggtggcgcaaatcgatcttccagatactccgcaatggcagaagattcactcaactcaaaatcatcgatttgtaataacggcacacggcgtgtctgaccgtaaccttgccacgtcggctgcaaatgttcaccgctgtcgaggtcgatggtcttgatatgaaacgacaggcctttttcctgcaacgccacccaggcggataacacataaggggagaaaaagtgggcatctgaccaaagcgtgatagcgggtttactcattatgtcctcggcaataaagggggctggctatcaaactatagagcctttttgtcactgtcacgtgacgaatactcacgtaagtcgccgcgctttctatacttgtggtgttcagatgattaaacaaccggagctgcaatgatcgatctctatttcgccccgacacccaatggtcacaaaattacgctgtttctcgaagaagcagagcttgattatcgcttgattaaggtagacctggggaaaggcggtcagtttcgtccggaatttttgcgcatttcgcccaacaacaaaattccggcaattgttgatcattctcctgccgatggcggcgaaccgttaagcctctttgagtctggtgccattttgttgtatctggctgagaaaacaggactctttttgagtcatgaaacgcgtgagcgcgccgccacattacagtggttattctggcaggtaggcggactggggccgatgcttgggcaaaatcatcattttaatcacgcagccccccaaaccattccttacgctattgaacgttatcaggttgaaactcagcgtctttaccatgtactgaacaagcggctggaaaactcgccctggctgggaggcgagaactacagcattgcggatattgcctgctggccgtgggttaatgcctggactcgccagcgaattgacctcgcaatgtatccggcagtcaagaactggcatgagcggatccgttcgcgccctgccaccgggcaggcactgctaaaagcacaactcggtgatgagcgttcggatagttaacagaaacaggttctcgtgtattatttcatcctaagtaaaacaacggagaacctgcaatggcacaacctgccgctattattcgtataaagaaccttcgtttacgtacgtttatcggaattaaggaagaagaaattaacaaccgtcaggatattgttatcaatgtgacgatccactaccccgccgataaagcgcgcactagcgaagatatcaacgatgcgctgaattatcgcaccgtaacgaaaaacattattcagcatgtagagaataaccgtttctctttgttggaaaaattaactcaggatgtgctcgatatcgcacgtgaacatcactgggtgacgtatgctgaagtggagatcgataaactgcacgcgctgcgctacgccgattcggtatccatgaccttaagctggcagcgttaaccgccatatcgggaggctgcatgaacatagtgatcaccggagggacgggattaattggtcgccatttgattccgcgtttgctggagctgggccatcaaatcacggtagtgacgcgtaacccacagaaagccagttccgttctcggccctcgggtgacgctatggcaagggctagccgatcaaagcaacctcaacggcgttgatgcggtaatcaacctggccggagaaccgattgctgataaacgctggactcacgagccaaaagagcgtctctgccaaagccgctggaatatcacgcaaaaactggtcgatttgattaatgccagcgacacgccgccgtcggtactcatttccggctcggcaacgggctattatggcgacttaggtgaagtggtggttaccgaagaggaaccgccgcataacgaatttactcataaactctgcgcccgctgggaagagattgcctgccgggcgcaaagtgacaaaacgcgagtgtgcctgctgcgaaccggcgtggtactggcaccggatggcggtattctcggtaaaatgctgccgccgtttcgtcttggcctgggcgggccgattggctctggtcggcagtatctggcctggattcatattgatgatatggtcaacggtattctctggctgctggataacgagctgcgcgggccatttaatatggtttcgccctacccggtacgcaatgaacaatttgcccatgcgctcggtcatgcgctgcatcgcccggccattttgcgcgtccccgcgaccgccattcgactgttaatgggcgaatcttcagtactggtattaggtggacaacgcgcgctgcctaaacggctggaagaagcgggttttgcgtttcgctggtacgatttagaagaggcgctggcggatgtcgttcgctgatgtggtttacagcaaacatccgccagttaactcccggtgttacaggattagtggctttgcgctataagatcgtctggcgatagtcgggtcaccatcataactaactctctgtctaaacctctatccagcatctcctgagcaatacgcagggcttcttcgtgtttgccctgcattgcgccttcttcacgtaatctgtcagcaatggtcatcagtttctccttttcttgtggtgcgcgttctgttatctcaccaataaatgcacggaaacgctgggcatcccctgtttgtaatacgtaattaaacagggcttttagctgtctgtcattagtgttccctgtaactagcagcgaaacaatttggtcgactaatcccaacagatcgcgctgacgaatatgtttctgaattaactccaacagcgccattttgcggtgttgcataatctcgtcatccggcaccacggtaatatccaccaacggaaacgctgatgaatatattttgcgggctatagcaggctcggcaaattcatcaagccagcagagtgaataaggataaggacttctgcaaccatgataaaacagcatcgggatcaccaatggaagctctttatagcccgcatcaagatggttttgcattgccgcaatggaataacgcatcatgcgaaaagccattaattcttccggcttactttggtgctctatcactacataaatataacccactccctcctgcgttttcacagaccacaagaggtcggaataatattgccgcaggtcgtcatcaataaaactgtttggttccagtttaagcgtcgttaaatcacacagtttgcgcagcggcgcgggaagatgaatatcaataaaatcccgcgcggtgtctggatggcgtaaaaaagatttaaataccgcatcatgcggcgtggaagttgtcgatattgtcatggcgttccgtcacccctcaaatttaagatgacgcgacaataaccacgattaacacccaatgcagcaggcagtttttatctttggacagcgaattcagaagtatttttagcggactgcaacttttacatttcagcggaagctgactcgcaaattccccatgaaaatactccggcagcgttagccaccggagaggaaattatttcagcgatcccttaaggaactgttgcagacgagggctttgcgggttgccaaataactgctccggcgcgccctcttcttctattttcccctgatggaggaaaatgacgtgagtagaaacatggcgagcaaagcccatttcgtgagtcactaccaccatggttttcccctcttctgccagttgctgcataatacgtaacacttcgcctaccagttcaggatcgagcgccgaggtaggttcatcaaacagtaaaacttccggttccatcgccagcgcccgcgcgatagaaacacgctgttgctgaccgccggaaagatgcaccggatatttcccctgcgcacgttcgtctatcccgactttcgccagatacttcaccgcccgctcgcgcgcttcctgcttgctcaggcccaacacctgaatcggcgcttccatgacgttttccagcaccgtcatatggctccagagattgaagtgctggaataccatcgtcaggcgtgtgcgcagtaagcgcagttgatttttatcggcgactttgagttgaccatctttgtcgcgcaccagattgatcgtctggccactgaccacgatcgatccttcgctcggtttttcgaggaagttaatgcagcgcagaaaggtacttttccccgatcccgacgatccgatgatgcttattacatctccggcattcgcttgcagtgacacccctttcagcacttcgtgttcgccatagcgtttgtgcaaatcgataacgtttaatttattctcggacatcgtattctcagtgcgttgaagaaggtttcacatgctgcaaccagcgtttttccgctctgcgaaagaggctgatcaggacataagagatgattaaatagagcaccgcggcaatgccgaaggcggtaaaaggttgatacgtggcggcgttaatatcgcgggctattttcagcagatccggcaccgtggccgtaaacgccagcgcagtagagtgcagcatcaggatcacttcattgctgtatgccggtaacgcaatacgcagcgcagaaggcaaaataatgcagcgatacattttaaaggtcgagaagccataggctctggcggcttcaatttccccatgcggaaccgaacggattgccccagcaaaaatctcggtagtgtaagcgcaggtgttaagcgtcagcgccagcacggtacagttcaggccactgcggaagaaagcgttaaggaattcggttcccttaacaatctcaagcgtgtacatgccggaatagaacaccagcaactgaacatacagcggcgtaccgcgaaaaatataggtaaataaccagattggaaactggatgtatttattactggagacacgaccaatcgccagaaacagcgccaggactccgcctatcactaccgacaaaataagcagccacagagtgatcgccacaccagtaaagcgataaccgtcggtccacagcagcggtttccagtattcatgtaagatttcgatcacaggtcagccctcttcacacccacggagtagcggcgctcaaggaacagcagcacaccattggaaacagtggtgaaaaccaagtaaatcacgccacagacgatggcgaaatagaacggttcccaggtacttttgcctgccagttgggtggctttgaccacatcttccaggccgagtaacgaaaccagtgcggtagatttgaggatcacctgccagttgttgccaatgcctggcagggcgtaacgcatcatcgccggaaacatgatccgccgaaacacttgcccacgagtaaaaccgaacgccgtcgccgcctctatatgtcctttcggcactgccataaaagcaccacggaacgtttcggtaaaataagcaccgtagataaaaccgagagtgataataccagcgaccatcggatcgatatcaatctgcccgacgcccatcgcctccgtcaccgtgtttagcgcaatctgcaaaccgtagaaaatcagcagcatcaacactaagtccggcacgccacgaatcagcgtggtgtacccttcgaaaatcagccccgaaagccgattttgcgagagcttaccgccagcgccaattaaaccgatgattacagcgagcactacagagctgatagccagctccagcgtgacgagcgcaccctgtaaaataacacctgaaaacccatacaacatgctgcctgtcctgtcgtgtgtggtgaattaccgcctcttgtctccctccggttacccgaagggagcgggctttctttcaccgatggcgattagccaccataaacatcaaaatcgaagtactttttcgctaatttctcgtaagtaccgtcagcgcgcatttcggcaaaggctttgttcagtgcttcgcgcagttcgttatcttctttacgcaggcccatgccggtccctacgccaaacagtttttcatctttaacagacgggccaccgaatttgtaatctttaccgacaggttgtttgaggaaaccttcgctggcagcgacctcatcctggaacgcggcatcaatacgtccggcagtcaggtcagaataaatgttgtcctgcccctgatacgagacgatttcaatgccttttggtgcccaatgttcattaccgaacgtctcctgggtggtgccctgcaatacgcctacccgtttgcctttcagcgactcgactgtcggctgaatgtcagaatttttcgccaccaccaaacgagaatcggcagcgtacagtttgtcggtgaaggctatttcttgctgacgtttttccgtaatggaaagcgatgacatgatggcgtcaatcttcttcgcttttaaggacgggattaacgcatccagcggattttcgacaaacgtacattgcgtattgatgcgtttgcataattcctttgccagatcgatatcgaagccaaccagttcgccttgtgaattttttgattcaaatggcgcataggtcgggtcggtaccgatgcggatgttttgcggaatcgcagcaaacgccgcagttgcgctggagaaggccagaaccagagagagcgatagcaccagttttttcataatgtcctcaactgacagtctttttatagggaatatttacaggtttgttacacttatcgtgccataaaattgaccatcaaggcaaaatatcccgccccgttagacgtattatttttcattaaaaatgcttaagtatgcatttcaatgcaccacgatagtgcaacaaacctggcgtgcaccatgatgatcattccatcaggtacagcttcccagcgacgtatcagtcaccgtagacattaaagtcgaaatactttttcgccatcttgtcgtaggtgccgtcctgacgcagctcgccaagcgccttattgaaggcagccgtcagttcagcatcatctttacgtagccctacaccggtgccatcaccgaagtattttttgtcttttactgatgagccagcaaaggcgaaatctttaccagcaggttgcttgaggaatccttcgctggcagcaacttcatcttgtaacgcagcatccagacgtcctgcagccagatcggaatagaccaaatcctggttggcataggccaccacatccacgcctttgctacgccaggtctcgttagcgtaagcttcctgggttgatccctgcagcacaccaacatgtttacctttcagtgaatccagcgttggctgaatcggtgaacctttggcagcaatcaaacgagaatctgcggcgtacagcttgtcggagaaggcaatctcctgctgacgtttatcggtaatggaaagcgacgaaataatggcgtcgatttttttcgctttcagtgaggggatcagcgcgtcaaagtcactggcaacccaggtacatttcacctgcatccgtttgcacatctcgttaccgagatcgatatcaaagccaacaaaatcacctttagcatctttcgacgagaacggcgcataggtggtatcggttccgatacgtaccgtctccggtagcgccgcatagctggaagccgctgcggagagaccgactaacaaagacagagcgagaatcgacttcttcatacataaccctcaagtgaaaatggcttttttatgttgtgtattgtgttgtgtgtttgcaggctctttcatgcaggtcttatgccatcttgacgacaacagtaacattcaacgttaaatatgttaataagacgttgcattattgtcctgaagttgaagatagcaggtatagcggttgaatcgcagcgtttcgattgaatggcagaaacaaaatgtcgaggatttgatcgcggttgcaaaattgccctgaaacagggcaacagcggagttatgcgccctgccagcgggcaaagagatcttcaggaagggttatcgcaaactggtcaagaacacgattaaccgtctgatttatcacatcatcaagggattgcgggcgatgataaaacgccggaacgggaggcataatcaccgcaccgatttctgccgcctgagtcattaaacgcagatggcctaagtgcaatggtgtttcacgcacgcagagcaccaacgggcgacgctctttcagcaccacatctgccgcacgggtcagtaagccatcagtatagctatggacaatgccggaaagggttttgattgaacagggtaaaatcaccatccctagcgtctggaaagaaccggaagagatgctggcggcaatatcgcgcgcatcgtgcgtgacatcggctaatgcctgcacttcgcgcagagaaaaatccgtttcgagggataaggtctggcgcgctgcctggctcatcaccagatgcgtttcgatatctgtgacatcgcgcagaacctgtaataagcgcacgccataaatcgcgccgctggcaccgctgatgcctacaatgagtcgtttcataaatagttgccctgtcagacttgcaggcagactttgcaggatttcggcgggagttgcaagtcagggtgccagaccggcaccctcagcgaaggcatcatccttcgttatgcatttcgagattttccacttcgttctgacgttgcactgctttggcgtcatcattacgtaacgtatcgaggaaatcgaggtagccctgatcaacatctttggtgacgtagacgccgttgaacaccgagcattcaaactgctggatatccggattttcagcgcgaacggcgtcgatcagatcgttcagatcctggaaaatcaacccgtcagcaccgatgatctggcgaatttcatcaacttcgcgaccgtgagcgatcagttccgtggcgctcggcatatcaataccataaacgttcgggaagcgaatttccggtgccgcagaagcgaggtacactttcttcgctccggcttcgcgtgccatctcgataatctgctcagaagtggtgccacggacgatggagtcgtcgaccagcaggacgtttttatcgcggaactcggcgcggttggcattcagtttacggcgcacggacttacgacgcagctgctggcccggcatgataaaggtgcggccaacatagcggtttttaacgaagccctggcggtacggtttgcccagaatacgagcaatttccagcgcgatatcacacgaggtttctgggatcgggatcaccacgtcgatatccagatcttcccattcgcgggcaattttctcgcccagtttcgtgcccatattcacacgcgcgctgtaaacggaaattttgtcgatgaacgagtccgggcgagcaaagtatacatactcaaacaggcacggattgctgaccggattgtcagcacattgacgggtaaacaactgcccttcttcagtgatgtaaatcgcttcgcccggcgcgacgtcacgcaggaaatcaaagcccagcgtatcgagcgctacgctttcggaagcgaccatatattctgtacggttctcgtcaatatcacgttttcccagtaccagcggacgaatcccgtttggatcgcggaaagcaaccataccgtggccgataatcatcgccacacaggcatatgcgccgcggattaagcggtttgtggcagcaatggcagcgaaaatattgtcggcttccagcgggtagtggcggaagttgtccagctcgctggcgaagatattaagcagaatttccgagtcggaagtggtgttgatgtggcggcgtttttcttcaaacagttttttacgcaactcgtgagcgttggtcagattgccgttgtgggcaagcgtaatgccatacggggagttaacgtaaaacggctgcgcttcagaggcgctggagctgccagccgtagggtaacgcacatgaccaatgcccatattgccctgcaaacgctgcatatggcgagcttcaaatacatcgctcaccagcccgttcgctttacgcaaacggaagcagttattggcatctatggtgatgatgccggcggcatcctgaccgcgatgctgaagcaccgttaaggcatcataaatcgactggttaaccggcataacaccggcgataccgacaataccgcacatacgtctttttcctcgttaagccacatctc

SEQ ID NO: 228 - DNA, 22749 bp, Escherichia coli
  source 1..22749: mol_type = genomic DNA
aatacggagaaataacgatgcgtattgtcatagatttacaaggcgcacagacggaaagccgctttcgtggcattggtcgttatagtatcgcaatcgccagaggcataatcagaaataacagccggcatgagattttcatcgcgctatccgccatgctggatgagtcgattgcggatattaaggcgcaatttgccgatctcctgccggcagaaaatatagtcgtatggcatgccgtaggccctgttcgtgcgatggaccaaggtaatgaatggcgtcgggagagcgcagaactgattcgggaagcgtttcttgaatcattgtgtccagatgtcgttttcattacgagcttgtttgaaggtcatgtcgacgatgcggctacatcggtacacaaatttagtcgtcagtataaagtagccgtactgcaccacgatcttatccccctcgtgcaggcggaaacctatctgcaggacgatgtatacaaaccctactacttacagaaagttgagtggttaaaaaacgctgaccttttgttgactaactctgcttataccgcacaggaagcgatcgagcatctgcatttacagggcgatcatgtgcagaatattgcagccgcagtcgattctcagttttgtatggcggaggtgacagcgagcgaaaaagagaccgtccttggccattacggtattcagcgcgagttcatgttgtatgcgcccggaggatttgactcaaggaaaaactttaaacggttgattgaggcctatgccgggctcagtgatgccttacgtcgcagtcatcaactggttatcgtcagtaagctttccatcggtgatcgtcagtatctggaatcccttgcgtcaggtaatggtttacagcaaggcgaactggtactcactggttatgtgccggaagatgagctgatccagctctatcgcctatgtaagctgttcatctttgcttcactacatgaaggttttgggttgccggttctggaagcaatgtcgtgcggtgcgccggtgattggctcaaatgtcaccagtattcctgaagtcatcggtaatcctgaggcattattcgacccgtattctgtctcttccatgagggataagatcgcgcaatgtttgactgatgatactttcctcgcgcgtctgaaagacatggcgcagcagcaagcgcgaaatttctcttgggataaagctgcggtgactgctctggaagctttcgaaaagatcgcggtagaagacaccggtactgcgcaggttttgcctgaagctttgattcagaaaatccttgctatctcacaagggcagccagatgaccgcgatctgcgcttgtgcgcaacggccattgattacaatctgaaaacggcagaactttatcaaatcgacgataaatcgctgaactggcgtgtagaaggcccattcgatagctcatatagtctggcgttggtcaaccgcgaatttgcccgggcactctcagccgatggtgtagaggtcttattgcattccactgaaggaccgggtgattttgccccagatgcctcgtttatggcgcagtcggaaaatagtgatcttctggcattttataatcaatgtcagacccgcaagagtaacgaaaagatagatattcttagcagaaatatctatccaccgcgggttaccaaaatggatgccaaagtaaaattccttcattgttatgcttgggaagaaacgggctttccgcaaccgtggatcaatgaatttaatcgggaacttgacggagtgctgtgtacttcggaacatgttcgtaaaatattgattgataacggactgaatgtgcccgcatttgttgttggcaatggctgtgaccattggctcaatatcccagccgagacgacaaaagatgtggatcacggaacattccgtttccttcatgtctcttcttgtttccctcgcaaagggatacaggcaatgcttcaggcttgggggagggcgttcactcgtcgtgacaatgttatcttaatcattaagacttttaacaatccgcacaatgaaattgacgcatggctggctcaggcccaggctcaattcatagactatcccaaagttgaagtgatcaaagaggatatgtcagccaccgagcttaaagggctttatgaaagctgtgatgttttggttgctccaggttgcgctgaaggctttggtttacctattgctgaagcaatgctgagtgggctaccggctatcgtcaccaattggagcgggcaacttgattttgttaattcacaaaattcatggctggttgactatcagttcactcgggtaaaaacgcactttggtctgttttcctcagcctgggccagtgtggatattgacaacttaacagatgcattaaaagcggcagcctcaaccgataaatcagtgctgcgtgacatggccgatgctggtcgcgagcttcttctgcagcagtttacctggaaagcggtggctgatcgttcttgccaggcggtcaagactctgcgtgggcatattgatattgcacagcatcgggcgcgcattggctggttgacgacctggaacacgaaatgtgggatcgcaacctattcccagcatctggtggaaagcgcacctcatggcgcggatgttgtttttgctccccaggtcagcgctggcgatcttgtgtgtgcagacgaagagtttgtacttcgcaactggattgtaggtaannnnnnnnnngtaggtaaagagagcaactatctggaaaacctccagccacacattgatgctctgagactcgatgtcattgtgatccaattcaactatggattctttaatcatcgagaactgtcggcgtttattcgtcgccagcatgacgccggtcgttcagttgttatgacgatgcactcaactgtggatccgctggaaaaagagccgagctggaatttccgtcttgctgaaatgaaagaggcgctggcactttgcgaccggttgttggtgcattcgattgccgatatgaaccgccttaaagatttaggcttaactgcgaatgttgctttattcccgcacggtgttatcaactactccgcagcgagcgtcacacgtcaacagcagtctttaccgctaattgcgagctatggcttctgcttaccgcataagggcctgatggaactagtagaatccgtccatagactcaagcaagccggtaaaccggttcgtttacgactggtgaacgcagagtatcctgttggggagtcacgcgatctggtggcagagcttaaagctgctgctcagcggttaggtgttaccgatctgattgagatgcataatgatttcctacctgatgcggagagtctgcggttgctttcagaagccgatcttctgatttttgcttatcagaatactggggagtctgctagcggggcggtacgttatggtatggcgactcaaaaacctgttgcggtaacgcccctggcgatatttgatgatttggacgatgccgtctttaaatttgatggatgcagcgtcgatgatatcagtcaggggattgaccggatcctgaattccatccgtgaacagaactcttgggcaaccaggactcaacaacgtgccgatgcatggcgggaacaacatgattatcaagctgtttcacgccgtctggttaatatgtgtcaaggcttagctaaagctaaatattttaaataaaaatatctctcttgtattttttgcctttgaatacaagaggggttagataatgtgtcatttattatgaaaattatttttgctactgagccaattaaatacccattaacgggcatcggtcggtattccctggagctggttaagcggctggcggtcgcccgcgaaattgaagaattaaagctatttcacggtgcgtcgtttatagaacagatccctttggtggagaataaaagcgataccaaagccagcaatcatggtcgtctgtcggcgtttctacgccgacagacgctgttgattgaggcttatcgcttgctgcatccgcggcgccaggcgtgggcattgcgcgactataaggattatatctaccatggccccaatttttatctgccgcataaactggaacgcgccgtgaccacgtttcatgacatatccatttttacctgcccggaatatcatccaaaagatcgggttcgctatatggagaagtccctgcatgagagtctggattcggcaaagctgatcctgactgtttctgatttctcgcgcagtgaaattatccgcttgttcaactatccggcggagcggatcgtaaccaccaagctagcctgcagcagtgactatatcccacgcagcccggcagagtgtctgccggtactgcagaaatatcagctggcgtggcaggcctacgcgctatatatcggcaccatggagccacgtaaaaatatccgtggcctgctgcatgcctatcagttgctaccgatggagatccgcatgcgctatccgctaatccttagcggctatcgcggctgggaagacgatgtgctgtggcagttagtcgagcgcggtactcgggaaggctggatccgttatctcggatatgttccggatgaagacctgccgtatctgtatgcagcggccagagtctttgtttatccctccttctacgagggattcggtttacctattcttgaagcgatgtcttgcggtgtgccggtagtatgctccaatgtcacctctttgcctgaggttgttggcgatgccggcctcgttgccgatcctaatgatatagacgcgattagcgcacaaattttgcagagcctgcaggatgatagctggcgggaaatcgccaccgcgcgcggtcttgctcaggcgaaacagttttcgtgggagaactgtgcgacccagaccattaacgcctataaattactctaagggtgtcagttgagagttctacacgtctataagacttactatcccgatacctacggcggtattgagcaggtcatttatcagctaagtcagggctgcgcccgccggggaatcgcagccgatgttttcacttttagcccggacaaagatacaggtcctgtcgcttacgaagatcatcgggtcatttataataaacagctttttgaaattgcctccacgccgttttcgctgaaagcgttaaagcgttttaagctgattaaagatgactacgatatcatcaactaccattttccgtttccctttatggatatgctgcatctttcggcgcggcctgacgccaggactgtggtgacctatcactctgatatagtgaaacaaaaacggttaatgaagctgtaccagccgctgcaggagcgatttctcagcggcgtagattgcatcgttgcctcgtcgcccaattacatggcttccagccagaccctgaaaaaatatctggataaaacggtggtgatcccgtttggtctggagcagcaggacgtgcagcacgatccgcagagggtcgcgcactggcgggaaactgtcggcgataagttctttctcttcgtcggcactttccgctattacaaagggctgcatattctgatggatgccgctgagtgtagccgactgccagtggtggttgtagggggcgggccgctggaatcggaagttcggcgtgaagcgcagcagcgcgggctgagcaatgtgatgtttaccggcatgctcaacgacgaagataagtacattctcttccagctctgccggggcgtggtattcccctcgcacctgcgctctgaggcgtttggcattacgttattggaaggcgcacgcttcgcaaggccactgatctcttgcgagattggtacaggtacctctttcattaaccaggacaaagtgagtggttgcgtgattccgccgaatgatagccaggcgctagtggaggcgatgaatgagctctggaataacgaggaaacctccaaccgctatggcgaaaactcgcgtcgtcgttttgaagagatgtttactgccgaccatatgattgacgcctatgttaatctctacactacattgctggaaagcaaatcctgagagatgctacccccgccgttgctgcgggggccaatgcgttaatgccgattcttcagattatcaatcacttctccgagatccagcccctgatcctgtaacagcaccagcaggtgatacatcaaatcagatgcctcgttggtcagctcaaagcggtcatgtaccgttgctgccagtgcggtttccacgccttcttcgcccactttttgcgcaatgcgtttggtgccgctggcatacagtttggcagtgtaagaagtttccgggtcggcagatttgcgttcggcgagcaattgttccagttgatacaggaacagccattggtgagcggtgtcgccgaagcagctgctggtgcctttgtggcaggtcggaccgatgggattcgccagcactaataaagtgtcgttgtcgcagtctggtgcaatactaaccacattgaggaaattgcccgacgtttcgcctttggtccacagtcgctgtttagtgcgcgagaagaaagtgactttgccgctttcgagggttttgtctaaggcttccgggttcatatagccaagcattagcacttcgccggataccgcgtgttgcacaatcaccggcatcagtccgtcggttttttcccagtccagttcgcgacgttgttgttctgttaacatatcctgatctccacgccctgtgttgccaggtacgcttttaattcaccaatattgattatttgtttgtggaatacagaagctgccagcgcgccgtcaacgtcggcatcgcggaaggcttcgaggaagtgttccatggtgcctgcgccaccggaggcaatcagcgggacgtggcaaacttcacgcacttttttcagttgtgccaggtcgtaaccgttacgcacgccgtcctgattcatcatgttgaggacgatttctccggctccacgtttttgcacttcctgtacccagtcgagtgtttcccactgagtgacgcgggtgcgactttcatcgccggtatattgattcacatgatatttaccggtttcggcgtcgtaccaggtatcaataccgaccacaatacactgcactccaaagcgatcggccaggcgagtgattaacgtcgggtccgccagcgcaggggagttaatggaaattttatccgcgccaaaagaaagaattttcgcggcgtcatccagcgacttaatcccacccgccacgcagaacgggatgtcgatcacttccgccacgcgggatacccagcttttatctaccacgcgtccatcactggaggctgtgatatcgtagaacaccagttcgtcagcgccttcttcggcgtagcgttttgccagcggtacaatatcgccaatgatttcatggttgcgaaactgtacgcctttcaccacctgaccatcacgaacgtcgagacatggaattatgcgttttgccagcatgcgatggcctccttcacggtgaatttaccttccagtaatgcccgaccaactattacgccgcgcacgccagtaccacgtagagcagcaacatcatcaatgtcgccaataccgccggaggactgaaatgccacctgcggatatctggcgcaaacttcttcatataaagagacgttagaacctgccagcgtgccgtctcgcgagatatcggtacacagcacatgtttcaggccgacgggcagataggtttccaccagttgttccagtgaaacgcccgagttctcttgccagccgctgactgccacctgcttgttgccttgctcgtcaatacggacatccagcgccagcactaaggcatcggcaccaaaacgttcaaaccagaccttcaccatttctggtgatttcaccgcggtggagccgaccaccacgcgcgcaacgcccgcttccagtaacgccgccacgtcttcttcgctacgcacgccgccgccaacctgcaccggaacgttaacgcccgccaccagggttttaatcagcgggatttgacgtctagccggatcttttgctccggttagatccaccagatgcaacacttcggcaccctgcgcggcgtaatcctgtaagcgcggcagcgggtcgttaccgtaatcgcgttgtttgccgtaatcgccctgatggagacgcaccacggtgccgtcgattaaatctaatgccggaataatcatcacatctccaggaagtttttcagcaacttagcgccagcggcaccagaacgctccgggtggaactgcacgccgtagaagttatctttttgtaccgccgcggtgaacggttcgccgtaattacactgggcgatggtccacggattgaccggcattgcgtagctgtgaacaaagtaaaagtacgcgccgtcttcaatcccctgaaacaggcggttgcctgcctgcaggtaaacgcggttccagcccatatgtggcagcggcagaccaaagtcggtcattttcggcacgtcttcgtcgatgatgcccagcaaatcgacgccgttgctctcttcgctgcgccgccccagcagttgcatccctaagcagatgcccagcaccggttgggtacaggctttgatgagatcaaacaactcgcgctcacgcacctggtccatcgccgcttgcgcggtgccaacgccgggtaaaaacagtttatcggccagcaacacgacgtccgggtcacggctaactttgggttcataaccgtgacgcgcaatggcagacttcaccgagttcaaattggcgcagccggtatcaaggatcaccacgttcattacagcactcctttcgacgagggtagggtgtcgccttccacgcggatggcctggcgcagggtgcgaccaaaagctttgaacaggctctctactcggtggtgatcgtttttacctttggttttcaggtgcagggtcacgcccatagtgtatgagagcgaacggaagaagtgctcgatcatttcggtgctgagatcgcccacacgctggtaggtaaactcggctttatattccaggtgcgggcgaccagagatatccagcgcgcagcgggcaagacattcgtccatcggcagcacaaaaccgaagcggcaaataccgcgtttgtcgccaagagctatttttaacgcttcgcccagcgccagaccggtatcttcgacggtgtggtgatcgtcgatatagaggtcgcctttaacgttgatttccatacggaaaccgccgtgagtggcaatctgatccagcatgtgatcaaaaaagccaacgccggtgttaatcttgctgccaccctcgcgatccagccacacctgaacgtcaatctgcgtctctttggtgttgcgcactacatgggcataacgatcgcgtttagtgagttgttcgccaatcatcggccagttcagagtatcgcggtcgtaacgtaaaccattaatgcccatgttttcggccagttgaatatcggtcgcgcgatcgccaataacataactgttggcacgatccatcgcttgctcagccagataacgctccaccagtttgactttcggcttacggcagtcgcactcatcggcgggcaggtgtgggcaaatcagcacttcatcaaactgcacgccttgcgaggtgaagatctgcatcatcaggttgtgcgggccatcaaaatccgcctgcgggaaactttgtgttcccagaccatcctgattcgtgatcatcaccagcttgtagcccgctttttgcagcttcagcagttccgggatcacgcccggttcaaaggcgagtttgtcaaaacggtccacctgaaaatcactcggcggttcgctaatcagggttccatcgcgatcgataaaaagatacttctgactcatcaaacttgctccgcacgtaaggcgtcaatgacgcgctggctttcttcacgggttccgacggtaattcgcaggcagccgcttaaagagggttgtttattctgatcacgtaagataatgccctgatcccacaaagatttaaacactgcgctggaggctttaaagcgcgccagaatgtagttggtttcggagtcgaaaacctgctccacgcaggggatctcttttagtgcggcaatcaggtattcgcgttcagcaataatttgcgccactcgttcgcgcatggcgacgattccctgcgggcttaacgcctgggctgcaatatcggcaaccggtgtcgagagcgggtagggggcgatcactttcatcagcaggttgatgacgtcttcgtttgccagcgtaaatccgcaacgaagccccgccagagcaaaagctttcgacagtgtgcgcaaaatagccaggtgcggatattctgccagccagccagccagcgatgcctgcgggcaaaactcgatataggcttcatcggcaaccacaatcgccttaccgcgggttaactccagcagagtgcgaaaatcctgcgggttgatcagttgcccggtcggattgttggggctgcaaacatagaccacttttaccccgtccagcttgtcggaaatgccctgtaagtccagttgccagttgtccagcgtcggcactgtgcggcattcgataccaatggtttcggcgctaacgctgtacatgccatacgttggcggacagtagaggatggcgtctttacccggttcgcaaaaagcgcggatcagcagttcaataccttcgtccgcgccacggctgaccagcacctgctccggttttacgcctgcatattgcgcgtaatttttaatcaccgctttcggctggcattccgggtagcggttgagcgtttgctgagtaagctgaaactccacggcagtggggtattcgttggcgttcagccagacatcgccgttaccgcccagacgacgcgctgactgatacggcgtcaggttgcggacgttttcacgcgctaaatcggtaatagtcacggtgctcatgcttgctccttaagggcgttaacacgcaaagtaacggcatttttatgggcggtcaggcgctcggcggcggccagtgtttcaatggtcgaagccagcgcggagaaacctacttttgacagttcctgcacggtcatgcgcttctggaaatccgccagcccgaggctggaacaggtggcggtgtaaccgtaagtcggtagaacatggttagtgccggaggcatagtcgcctgccgattccggtgaccagtcaccaagaaataccgaaccggcgctggtgatgccatcgaccagttcgcgggcgttgcgggtctgaatgatcaggtgctccggaccgtactggttagatatctctacgcactgcgctaaatcgttggtcacgatcaggcggctggtgctcagtgcctgacgggcggtttcggcacgcggcagttctgccagctggcgttcgacagcttcggcaacgcgacgcgccatatcagcagcgggcgtcagtaaaatcacctgagagtccgggccgtgttcagcctgggagagcaaatcagaagccacgaaatccggcgtagcaccgctgtcggcaatgaccagcacttccgatgggcctgcgggcatatcgatcgccgcaccgtccagacgctggcttacctggcgttttgcctcggtgacaaaggcgttgcctggcccgaagattttgtccacttttggcacggattctgtaccaaacgccagtgcggcaatggcctgtgcaccgccgacgttaaacacgtcctgcacaccgcacagctgcgccgcgtaaaggatctcatcggcaatcggcggtggtgagcacagcaccacttttttacagcccgcaatacgcgccggagttgccagcattaataccgttgagaagagcggggcggagccgccaggaatatacaaacccactgaagccaccgggcgcgtgacttgctggcaacgtacgcctggctgcgtttctacatctactggcggcagtttttgcgcagtgtggaaggtttcaatattttttactgccaccgccatcgcctgttttagctcgtcgctaaggcgttcgctggcggcggcgatctcctcagcagacaccttcagcgcggtaaccgtggttttatcaaacttcgcgctgtattcccgcagggcctcatcgccgcgtgctttcacgttatcgagaatatcgttaacggtgcgggtaatgctttcagaagcggagatcgccgggcgcattaacagctggcgttgttgctctgcagtacagctattccagtcaatgattgtgttaaagctcatggcgatcactccatcatcttctcaatcggcaggaccaggattgaactggcacccagcgctttcagtttttccatcgtttcccagaacagggtttcgctactgaccatgtgcatcgctacgcgctgttggtcacccgccagcggcagaatggttgggcgttcggcacctggcagcagggcgatgacttcatccagacgttcggtcggtgcgtgcatcatgatgtattttgattcacgcgcctggatcacaccctgaatacgggtcagcagtttgtcgatcagctgctgtttggattcttccatttcaccatcgcgctggataaggcaggctttcgagcggtagataacttcgacttcgcgcaggccgtttgcttccagcgtggcaccggtggaaaccagatcgcaaattgcatccgccagtccggcacgcggggcgacttcaacagaaccgttcagtaagcaggatttaaaagagatgcctttctggtcgagataacgcttgagcaggtgaggataagaggtggcgatacgtttaccgtttaaggagagcgggccgtcccaggcttcatcaaccggcgttgccagcgaaaggcggcagccgccgaaatccagacgacgcagggtaaagtagcgcggatcttcaccctgggctcggcggttaagcagctcttcttccagcacgttttcgccgataatcccaaggtctaccacgccgtccattaccagaccgggaatgtcgtcgtcacgtacgcgcagaatatcaatcggcatgttttctgccatcgcgatcaggcgctgggtgtgaagattgattttaatgccacagcgcgccagtaattcgcgtgagtcatcacttaaacggccggatttctgcatagctatgcgtaaacgagtgttgtctgtcattttcttattcctctttaaacctgtctgaaccgttatcaaccgcgcaataaaaaagcccccggaagatgatcttccgggggctttctcatgcgttcatgcaccactggaagatctgaatgtcttccagcacacatcgcctgaaagactagtcaggatgatggtgatgatggtggtgtttaaattgaacgcgtgtcataaaagtctctgtgaatgtttattcaactgatgtcttttaacctaaaccactttcacgttagaaagcaagggcttttttatatattttatggcgatggatttgtttaatgaatgagcggggaaaggagggggctaagaggactgacctctaagctgacggcaccaaaaatagcgaagcctggatttttcgactcactgacaatatcttgatctacaaactaattaataaatagttaattaacgcccatcattgtacaatgaaatgtacaaaagaggagattaacatgcgtacaattagctacagcgaagcgcgtcagaatttgtcggcaacaatgatgaaagccgttgatgatcatgccccgatccttattactcgtcagaatggagaggcttgtgttctgatgtcactcgaagaatacaactccctggaggagacggcttatctactgcgttcccccgctaacgcccggagattgatggactcaatcgatagcctgaaatctggcaaaggaacggaaaaggacatcattgagtgaaactaatctggtctgaggaatcatgggatgattatctgtactggcaggaaacagataagcgaattgttaaaaagatcaatgaacttatcaaagatacccgcagaacgccatttgaaggtaaggggaagccagaacccctgaaacataatttgtcaggtttctggtcccgacgcattacagaggagcaccgtctggtatacgcggttaccgacgattcactgctcattgcagcatgtcgttatcattattgaacagattcattcatagaatgaattgtcagttttgatacgctagcgtagccttatagatctaaggtatatcaggagataaggatgaaaaaggtcgcaattgtcgggttagggtggttaggcatgccgctggcgatgtcactttcagcgcgaggctggcaagtcaccgggagtaaaaccacacaagatggtgtcgaagcggcccgaatgagtggcattgatagctatctgcttcgcatggaacctgagttagtttgcgattctgacgatctggatgccctgatggatgccgatgcgctggtcattacgcttccggcacgtcgtagcggccccggcgatgagttctatttacaagcggtacaagagttagtggatagcgcgctggctcatcgtattccccgtattatttttaccagctcgacgtctgtctatggcgacgcacaaggcacggtgaaagaaaccaccccgcgtaatccagtaaccaacagtggacgagtattagaagaactcgaagactggctgcacaatttacccggtacttcggtcgatattctgcgtcttgcgggcctggtcggaccgggacgtcatcccggacgcttctttgccggaaaaaccgcgcctgatggtgaacatggtgttaatttagtccatttagaagatgttattggcgctatcactctgttgttacaggcacctaaaggcggacacatctataatatatgtgcgccagctcaccctgcgcgtaatgttttctatccgcagatggcccgtttactggggctggaacctccgcagttcagaaatagtctggacagcggcaaaggtaagattattgatggcagtcggatttgtaatgaactgggatttgaataccagtatcccgatccgctggtaatgccgctggagtaaacgatcacgccagcaggacgccgcatgcactgcaagggggcgtgtatgaaaccactgctggatgtgttgatgatcctcgatgccttagaaaaagaaggcagttttgcggcggcgtcggccaaactctacaagacgccgtccgctctgagttacaccgttcacaagctggaaagcgaccttaatattcaattgcttgatcgtagcggacaccgcgctaaattcacccgcaccggaaaaatgttattagagaaagggcgggaagttctgcataccgtgcgggaactggaaaagcaggcgatcaaactgcatgaaggctgggaaaacgagctggtgattggcgtggacgacacgtttcctttttctctgcttgcgccactcattgaagctttttatcaacatcatagcgtgacgcgcctgaagtttatcaatggcgtactcggtggttcatgggatgccctgactcaggggcgagcggatattattgttggcgcgatgcatgagccaccatcttccagtgagtttggtttttcacggttgggcgatctggaacaagtctttgcggtcgcgcctcatcatccgttagccctggaagaagagccgttaaatcgtcgtattattaagcgatatcgggcgattgtggtgggggatactgcgcaggcaggcgcttctacggcatcacaacttctcgacgaacaagaagccattaccgttttcgattttaaaaccaaactggagctgcaaattagcggcctcggctgcggctatttaccccgttatctggcgcaacgttttctcgatagtggcgcgttaatcgagaagaaagtggtcgcccaaactctctttgaacccgtctggattggctggaacgaacagaccgcaggacttgccagtggctggtggcgggatgaaattttagcaaatagtgcgatcgccggtgtttatgcaaaatctgatgacggaaaatcagccatttaaagaaaaattattctgacaagcctctcattctcttgtcatttcccccccatttaggcacaatgcgccgctgtcaaaaaatgactaaaaaccgacgtttcatcagcgtcggttattttttgcttcaaaccaatcattcataccaagaggccgggcttcgtaccggatagatatttactaaaaatcgacagttgttgtcgctgaggaatccaaaaaaatggggcaattttttgcttacgcgacggttatcaccgtaaaggagaatgaccatgtcgcataacgttactccaaacacctctcgcgtggaattgcgtaaaacgcttacgttagttccggttgtaatgatgggtcttgcctatatgcagccgatgacgctgtttgatacttttggtatcgtttcaggcctcacggatggtcatgtgccgacagcctatgcgttcgcattgattgcgatcctgtttacggctctgagctacgggaagctggttcgccgctatccttctgctggctctgcatacacttacgcccagaaatccattagcccgactgtcggctttatggtgggttggtcttctctgctcgactatctgttcgcgccgatgatcaacattctactggcgaaaatctattttgaagctctggtgccttccatcccatcgtggatgtttgtggtggcgctggtggcctttatgaccgcctttaacctgcgtagtctgaaatccgtagcgaacttcaacactgtaatcgtcgtgttgcaggtagtgctgatcgcggtgattctgggcatggttgtttatggcgtatttgaaggtgaaggcgctggtacgctggcgagcactcgtccattctggtctggcgatgcgcatgttatcccgatgattaccggggcgacaatcctgtgcttctcctttaccggctttgacggcatcagcaacctgtcggaagaaaccaaagatgcagagcgcgtgatcccgcgtgcgattttcctgaccgcgctgatcggcggcatgatcttcatctttgcaacttacttcctgcagctgtacttcccggatatctctcgctttaaagatccggatgcgtcacagcctgaaatcatgctgtacgttgcgggtaaagcgttccaggttggcgcgctgatcttctccaccattaccgtactggcgtccggtatggcggcgcatgcaggcgtagcgcgtctgatgtacgtaatgggtcgtgacggcgtattcccgaaaagcttcttcggttatgtacacccgaaatggcgtactccggcgatgaacatcatcctggttggcgcgattgccctgctggcaatcaacttcgacctggtaatggcaacggcgctgattaactttggtgcgctggtggcgttcactttcgttaacctgtcggtcatctcgcagttctggatccgtgagaagcgtaacaagacgctgaaagatcacttccagtatctgttcctgccgatgtgtggtgcgctgaccgttggtgcgctgtgggttaacctggaagaaagctcaatggttctgggtctgatctgggctgctatcggtctgatttacctggcttgcgtcaccaagagcttccgtaatccggttccgcagtacgaagacgtagcataatcatcttttctaataataaaccggagtcgaatgaacatttggctccggtttttttattcttttgtatcgaactcctcattaataaccatttgttctaatttagagaatttggttattggtctgcattccaccagtcatgaataatttcctcattaacattcatctggttaattaatttatgttttcaatgatattaagcgggctaatttgtggtgctctgctgggatttgtcatgcagcgtgggcgtttttgcctgacaggtggttttcgcgatatgtatatcgtgaaaaataatcgcatgttttacgccttgctgattgcaatttcggtacaaagcgtgggggtttttgcgttaattcaggcgggcctactgacttacgaagccggggcgttcccgtggcttggtactgttataggtgggtatatcttcgggctgggaattgttctggcgggtggatgtgccaccgggacctggtatcgcgcgggtgagggattgatcggcagttggatcgcgcttttcacttatatggtgatgagtgcggtgatgcgttctccacatgccagtggtttaaatcaaaccttgcagcactacagtactgaacataactctattgctgagacttttaatttgtctgtgtggccgttggttgccgttttgctggtgataacgctctgggtggtgatgaaagagttgaagaagccaaaactcaaagtcgcgaccttaccgccgcgccgaaccgggatcgctcatattctgtttgaaataccctggcgtcactttgtcactgctgtactcatcggtttgattgcgcttttagcctggcccctgagtgaagcaaccggacgcatgtttgggttaggaatcacttccccaacggccaatattctgcaatttctggtcgcgggtgacatgaaatacattaactggggcgttttcctggtgttagggatcttcgtggggtcatttattgcagccaaagcgagccgtgagttccgcgttcgcgcagctgatgcacaaacaacattacgtagcgggttaggtggtgtactgatgggcttcggtgccagtattgcaggtggttgctctatcggtaatggactggttatgactgcaatgatgacctggcagggctggattggccttgtatttatgattctcggagtctggactgcgtcctggcttgtgtatgttcgaccgcagcgtaaggcgcgactggcaactgctgcggcaaattaagtaaggtgtaaagatggtgattaaaaagctggatgtggtgacgcaggtctgtccgtttccactcatagaagcaaaagcagctctggcagaaatggtcagcggcgatgagttagtgattgagtttgattgcacccaggcaactgaagcaatcccacagtgggcggcagaagaaggacatgccatcaccgattatcagcagattggcgatgcagcgtggagcatcaccgttcaaaaagcctgactcaacattgtcctccgccgtaccagcggcggaggcttcaaattagacaatctcttccgcgtactgccaaagtgcttttaacagcgccactttctctttgtcatcggcatattgttgtaccagcatctgcaattcatcagcataaccctgcaaaaactctggcgtgaagacctggcgacggtgctccagccagcgttgctgctcggcataatccagcgtccccgggaagttgcgtgcccgataattgaacaacagcttttcaatccgtttatcaacaaaagtgatatccagtgccggtaaattacgcggctcggtttccagcacaattttcattgctgcacgatctgcgtcactgaaaaagccgttataaagctgtgcatccacgttatctgaaggcgtaaacggttcggcttccgcgaatatcgccaccactttttcgcgcacttgcggattttcacgctatcgaggcaatgctgacgattaattcccagtcggtcggcatcttccgggcgtagcgtattcgcctgggccagcaccggacatttattgatatgcaccagcttaaccggaacggcggcgttatcgccaagatcggtttttgcggtatataaacgctcgcgcaatgtgtcgctatccagttccagtaatggcgaaatgtctcctgccaaatccaccataattacggcattgcgattttcaggatgccacgccagcggtgccacccagctggtattgccgcgccatgctccaaacattccggaaacgtgcaccaggggtttcatctgcggaacatcaatcaacgccatcagtttgtgtttattacgatgggtaaagagataatcaaacaggcgtggctgacgcgtttttaccagctttgccatcgcaatagtggcgtacacatcagccatcgcatcgtgggcgttgctatgttcaataccattcgctttggttaaatgctcaaggcgaaagctcggtagaccgtcatcattttcaggccagtttattccttccgggcgcagggcataacaggcacgcataacatccagtaaatcccagcgcgagttatcatgctgccagctccaggcgtaaggatcgtagaaattacgataaaaaatgttgcgtgtgacttcgtcgtcgaaacgcacattgttgtagcccagaatacaggtcttcggtacggtaaaaagcgagtgaatacgggcggcaaacgcggcttcgttttctcctttcgcccgtgcttcctgcggggtaataccggtaattaatacggctcctggctggggtaaatagtcatcagcgggcttgcagtaaaagacttcgggttcgccgatgacattgaattcgctatcggtgcgaatggctgcgaactgtgcagggcgatctaacgcggggtgcgtgccaaaggtttcgtaatcgtgaaacaaaaaggtagattgttgcttaccgtcattcatcattaggttaaatccgttatttctgctgtctgccagagtatcaaatatcaccgtgctaatcagctttagcgccacaatttggcagcgagtggcaacagatcatgtcagataaaaatgagagggtagtcacattttcttgcactttattccagccagttcataagtatttccgtaaaaagaacagctatttgaaactcctgagggtttgctgttgaaacgccgtcttattattgctgcttctttgttcgtttttaacttatcgtctggttttgcggcggaaaacattcctttttcacctcagcctccagagattcatgccgggtcctgggtattgatggattacaccaccggtcagatcctcaccgcgggtaatgagcatcaacagcgcaatcccgccagcctgacaaagctgatgacgggttatgtcgtggatcgcgctatcgatagtcatcgcattacgccagacgatattgtcaccgtggggcgcgatgcgtgggcgaaagataatccggtgtttgtcggttcttcactgatgtttttgaaagagggcgatcgcgtatcggtacgtgatttaagccgtggtttaattgtggattccggaaatgacgcttgtgttgctctggctgactatattgccggtgggcaacggcagtttgttgaaatgatgaacaactatgccgagaagctgcatctcaaggatacgcattttgaaacagtgcatggtctggatgcacctggccagcatagctcggcttatgatttagctgtgctttctcgtgctatcatccacggcgagcccgagttttatcatatgtacagtgagaaaagtctcacctggaacggtatcacccagcaaaaccgtaacgggttgttgtgggataaaaccatgaatgttgacggcctgaaaacgggtcatacttctggtgccgggtttaatctcattgcttcggctgtagatgggcagcgtcgtctcattgcagtggtaatgggggctgacagtgcaaaaggtcgtgaggaagaggcaagaaaattactgcgttgggggcaacaaaactttactacggtgcaaattttgcaccgtgggaaaaaggtcggaacggaacgcatctggtatggcgataaagaaaatatcgacctgggaacggaacaagagttctggatggtgctaccgaaagccgaaattccacatatcaaagccaaatatacccttgatggtaaagaactcaccgcgccaattagcgcccatcagcgggtaggggaaattgaactttacgaccgtgataaacaggtggcgcactggccgctggttaccctggaatctgtcggggaaggcagcatgttttctcgcctgagtgattatttccaccataaggcctgacctttcttttgcagcagactggcaggagtgcgagtctgctcgcataatcaacactcattccttgtggttttaattttgcaactatgctgtatataaaaacagtatcaatggaggcgtcatgaactacgagattaagcaggaagagaaacgtaccgttgcaggtttccatctcgttggcccgtgggaacagacggtaaagaaaggctttgagcagttgatgatgtgggtagatagcaaaaatattgtgccgaaggagtgggttgctgtctattacgacaatccagatgaaacacccgccgaaaaattacgctgcgacaccgtcgtgacggtgccgggttactttacgcttcccgaaaacagtgagggcgtcattctgacagaaattacaggtggtcagtatgcggtggcggtagctcgtgtagtcggtgatgattttgctaaaccctggtatcagttctttaatagtctcttgcaggacagtgcttatgaaatgttaccaaagccctgcttcgaggtttatttgaacaatggcgcggaagatgggtactgggatatcgaaatgtatgttgcggtgcagccaaaacatcactaattcatctcagggcggtgtgttaacgcgatgaccactcttttttttgaaagcgaaaagagtaagatgcgcctttcaattttttcgctcctgccgggaaattacactgttcccggtttgtccgtcggataattcagaggcgcgccttctggccgacagatgagttatgagcgcttttaatctcattacggagtttctgcgtgcgtgccgataagtcattaagcccgtttgaaatccgggtataccgccattaccgcattgtgcatggtactcgggtcgcgc

SEQ ID NO: 229 - DNA, 22575 bp, Escherichia coli
  source 1..22575: mol_type = genomic DNA
tccataatccacgttaatggaaaacgactgtaaagcgccaaattaagttctttacgcaaccgggcaatataggcttcttcagaaagataataacccggctttttcattaaatagtgatgtgtctcaggcgtttcgccacgccaccacgccggacgggtatattttaaaataccgccaacctgtgcccaggtgagattcatccgcatcaatgtatgcaccagacgaatgccttgtgcattcccctcaaaataacataagtcctgacgaatcttgcgccgcagctcgttaagcggttcttccccgtcccgtaaacgtagtgctgccacgctgcagcgatcgtcagtcagaggctggctttcggcatcttccgggtataaacgctggcgaaaccagtcatttatcgccgcttcgccaaaatgaccaaacggcggattgccgatatcgtgcatcaggcatgacatctcaacaatgctttcaaaggggccggtcagttcatccaggccgtatgcttccagtaatttaagctctttcagacggcttagaatttctttggcgatgtagcgccccacctgctggacttccatcgagtgggtaagacgcgtgcgcacggcggcattgcgctccagtggaaaaacctgggtcttttgttgcagacgacgaattgccggagagttgatgatacgcccgcgatcgctctcgaagatccgcaggatctcatgttcggttttaacgccctgcggtgaacggtaacgacgatgccagtttattttttttcggaaatcaatctgtgccatgtcctctcccgcgtgagaaatacgcttccccgtaagcgcatggtaaactatgccttcaaatcgggcttatcgcgagtaaatctatgaaaatcggcatcattggtgcaatggaagaagaagttacgctgctgcgtgacaaaatcgaaaaacgtcaaactatcagtctcggcggttgcgaaatctataccggccaactgaatggaaccgaggttgcgcttctgaaatcgggcatcggtaaagtcgctgcggcgctgggtgccactttgctgttggaacactgcaagccagatgtgattattaacaccggttctgccggtggcctggcaccaacgttgaaagtgggcgatatcgttgtctcggacgaagcacgttatcacgacgcggatgtcacggcatttggttatgaatacggtcagttaccaggctgtccggcaggctttaaagctgacgataaactgatcgctgccgctgaggcctgcattgccgaactgaatcttaacgctgtacgtggcctgattgttagcggcgacgctttcatcaacggttctgttggtctggcgaaaatccgccacaacttcccacaggccattgctgtagagatggaagcgacggcaatcgcccatgtctgccacaatttcaacgtcccgtttgttgtcgtacgcgccatctccgacgtggccgatcaacagtctcatcttagcttcgatgagttcctggctgttgccgctaaacagtccagcctgatggttgagtcactggtgcagaaacttgcacatggctaagtcactgttcagggcgctggtcgccctgtcttttcttgcgccactgtggctcaacgccgcgccgcgcgtcatcacgctttctcccgccaacactgaacttgcctttgctgccgggatcacgccggttggggtcagcagctattccgactatcctccacaagcgcaaaagattgagcaggtttccacctggcaggggatgaatctggaacgcattgtcgcgctgaagcccgatctggtgattgcctggcgtggaggtaatgccgagcggcaggttgaccagctggcttcgctgggaataaaagtgatgtgggtcgatgcgacaagcattgaacaaattgccaatgcgttacgtcaactggccccctggagtccgcaaccagacaaggccgaacaagccgcgcaatccctgctggatcagtacgcgcaattgaaagcgcaatatgctgataaacctaaaaaacgtgtttttctgcaattcggcattaatccgccatttaccagtggaaaagagtcgattcagaaccaggtactcgaagtttgtggcggagaaaacatctttaaagacagccgggttccctggccgcaagttagccgcgaacaggtgttagcacgctcgccacaggcgattgtcattacaggcggaccggaccaaattcctaaaatcaaacaatactggggtgaacagctcaaaattcccgttattcctctcacgagtgactggtttgaacgtgcaagcccacgtattatcctcgcagcacaacagctctgtaatgcgctttcacaggtagattagtgcctgaccttttcaggtgctcagtggggattgaacaatgctcgtctattggctggatatagtcggcacagcggtatttgccatctccggcgttttgttagccggaaaattgcgtatggacccttttggtgttctggtactgggcgtggtaaccgcagtaggcggcggaacaattcgcgacatggcgctggatcacggcccggtattttgggtgaaagatcccaccgatctggtcgttgcaatggtcaccagcatgctgaccatcgtgctggtgcgccagccaagacgcttaccaaaatggatgttgccggtgctggacgccgttggtctggcggtgtttgtcggcattggcgtgaataaagcctttaatgcggaagccggtccgttaatcgcggtttgtatgggcgtcattactggcgttggcggcgggattattcgtgatgtactggcccgcgagatccccatgattttacgtacagaaatctacgcaactgcctgtattatcggcggtattgtccacgctacggcttattacacattttccgtaccactggaaacagccagtatgatgggcatggtcgtgacgctattgattcggctggcggctattcgttggcatcttaagctaccgacgtttgcgctggatgagaatgggcgttgaagagagaagatgtgccggatagtttatccggcacatgaacaacagattagatgctaaaggaagaaccgcaaccgcaggtgcttttcgcgttcgggttggtcacgatgaaacgagaaccttccagtccttcggtatagtcaacggaaccgccgaccagatattgcaggctcatcggatcaaccaccaggccaacgccctgtttttcgatggtcatatcgccttcgttcacctgatcatcaaaggtgaaaccatactggaagccgctgcaaccgccaccggtgatatacacgcgtaatttcagattcgggttatcttcgtcagcgatcaggcttttaactttgttggctgctgcgtcggtaaactccagcggcagtgctacgtcatcactcatattttgctccaaacgacatcggcaattgggcaaattctaacccaataataatcgccattatctaataccctggtatttcgttcaagtattctcgctggctgatgcggccttgcttcgcgccagttgctcagcttcctgttttgccagcgtgcgcgcaagaatcgccgagtatagcggtttcccgccggtaaattgcgctaatagtgttgcgccaagaccggtaataatcattggcaaaatgagctggtagttatcggtcatctccagaaccagaatgatccccgttaacggcgcgcgaatagatgccgccagtaacgcccccattccggcaatagcaaacgttcccgcctcaaggtgatattgcggaaacagctcaacggcaaccattccgaaagcggttcccagcacagtacccagcgccagcatcggggcaaaaataccgcccggcgcgccggaagagaagcagagtaaggtggtaatgacccgcgcgacgaagataaacaccagcattcccatgctgaaattccccgcggtagcgataggaatcaggttaaaaccgccgcccgacgttgctggtgccacaaaccccagcaatccacacagaccgccaatcgcaccgcccattagcacccatttggtaatattgccgccgtgcacacggtgcagcaaatcctgcatccccagcacccatttattaaaaatagggccgaaaatgccaaaaataataccgaggatcagataaagccacagcgtattaagcggcgcatcagaaagtttaccgacgtcaatcaacgcaacttcatgattaaaaatccggtacataatggtcgacataatgacgccaataaataccgctttaatcgaaattaacgtatagcgaaactgcggacgcatctcttcgataataaacaaaatacccgccagcggcgcgttaaaggccgcagccagccccgcagcagcaccggttgccagcagcgtatggcgagcttcatcacctttcaggcggaaaatatcaagcaccatgcgaccgatattgccgccgatctgcacggttggtccttcgcgccctagcaccatgcctccgccgagtgtccccagcccgccaaagaatttcaccggcaatacacgccaccagcgaacaggacgttgatcttccagcgccccttcaatttccgggatccccgatccccctgcttcgggcgcgtatttgcgcaccaaaaagtagccgaacatcgccagcaccgccgaacagagaaaagcgacagttaacagtagcggataattatcagcagtatgtaccagcgcccccatacgttggttctgcaaccaggcgacacctttgtcaaaagcaaccgcagccagcccgacaagcgtgccgacgactgccgccataaacaaaatggctaacggggttttatcgcgctcaagaagttggcgaatcagttgtctgcgtcgcaggcgcgcggcctgcggtgtttctaaagagggagtatcagttttcatccaatgatcacttattggtcatacaaataagatgacggcattttactcgcacgttccatgaaaatcctttgcaaagcgtaatgtttcaaatgcacaaaacttttatactctaagaaatcaggattgcaccagtacaagcagcctgatgtttgacgagtatttaacttgttatgaataacatagaatagcagccattcactttttctacgaatcaggaaccctccatgagtaagtctgaaaatctttacagcgcagcgcgcgagctgatccctggcggtgtgaactcccctgttcgcgcctttactggcgtgggcggcactccactgtttatcgaaaaagcggacggcgcttatctgtacgatgttgatggcaaagcctatatcgattatgtcggttcctgggggccgatggtgctgggccataaccatccggcaatccgcaatgccgtgattgaagccgccgagcgtggtttaagctttggtgcaccaaccgaaatggaagtgaaaatggcgcaactggtgaccgaactggtcccgaccatggatatggtgcgcatggtgaactccggcactgaagcgaccatgagcgccatccgcctggcccgtggttttaccggtcgcgacaaaatcattaaatttgaaggttgttaccacggtcacgctgactgcctgctggtgaaagccggttctggcgcactcacgttaggccagccaaactcgccgggtgttccggcagatttcgccaaacataccttaacctgtacttataacgatctggcttctgtacgcgccgcgtttgagcaatacccgcaagagattgcctgtattatcgttgagccggtggcaggcaatatgaactgtgttccgccgctgccagagttcctgccaggtctgcgcgcgctgtgcgacgaatttggcgcattgctgatcatcgatgaagtaatgactggcttccgcgtggcactggctggtgcacaggattattacggcgtagtgccagatttaacctgcctcggaaaaatcatcggcggtggaatgccggtaggcgcatnnnnnnnnnngtggtcgtcgtgatgtaatggatgcgctggccccgacgggtccggtctatcaggcgggtacgctttccggtaacccaattgcgatggcagccggtttcgcctgtctgaatgaagtcgcgcagccgggcgttcacgaaacgttggatgagctgacatcacgtctggcagaaggtctgctggaagcggcagaagaagccggaattccgctggtcgttaaccacgttggcggcatgttcggtattttctttaccgacgccgagtccgtgacgtgctatcaggatgtgatggcctgtgacgtggaacgctttaagcgtttcttccatatgatgctggatgaaggtgtttacctggcaccgtcagcgtttgaagcgggctttatgtccgtggcgcacagcatggaagatatcaataacaccatcgatgctgcacgtcgggtgtttgcgaagttgtgatgattttgcctcgcccaccgggcgaggcattcaattaacggctctgctttctcaacaaatagataaaatatggcgcgccgataaaggttgacagcagccccgccgggatctggaatggaaacagcaccatccgcccacaccagtcagcgaacaccagcagtaaaccacccaccagcgccgaaattacgatgtgcggcatcgtccgtcgaaagcccatcatccgcgcaatatgcggtgccattaaaccaacaaaactcaacggtccaatagtcatcgtcgcggtcgccgtcaggcaagccgctaacagcagcagcgcaattcgcgtcggcgttagcgccattcctacggctcgggcggtatcaccacccagcggtaaaatggtcagccagcggcggcacagcggggtaatcgccagcaaaatcaccatcacaattccggtgcgccagacctgcgcatcggtcgcgttgtaggtcgaaccggaaatccaggtcagcacttgcgccattcgcgggtcaccacttgcctgcaacatcatcaaaagcatggtgaacgcggtacttaacgccatccccgccagtaacatgcggtgtggggaaaatccaccgcgtccggcggcgatcataatgatcaacagcgtcaccgccgccccgagactgcctgcaggtaacaaccagccaaaggcattacccggcaccagaaacagcatcaacaccacgccaaacgctgcgccagagctaatccccagcacttccgggcttgccatcgggtttccggtcagccgctgaataatacagcccgccaccgccagcatgacgcccgcaaacagcgccgccataattcgcggccagcgccagggcattaaatcatcgagcagcgccccgctcgcccacgtccagccgtgcgcatcacgaccaaacgacagcgccaccaccacagcaattatcagcagcacaccgccagcaagggcaaacgccagcacatgttggcgttcagccgcgacacgatcgttgaccttcatatccggcgcgctaatgctgcgtaaacgcggcaacagccacagtagcagcggcgcaccgatcaacgcagtgaccgaaccggtggacacttccatccacacgcgagtcagccagaggatgatttgatcggaaagccagaggatcagcgccccaatcagcgacgccagcatcagtcgtggcagcagacgccgcgcccccagcatttttgccagcagcggcgcgaacaacccgataaagccgataatccccacagcgttcaccagcagcgcactgatgacaatcgccagcgacagcgctgccagacgcgcgagcgacaaggccagcccgagattgcgcgccacgccatcatcaagccccatcagggttaacgggcgaagtagcaataacgtcaacatcacgccgcccagcaactgcggccataaacgctcaacgccgccccagtcggtttgcgtcagcgttccggtgctccacaggaacatgctttgcagctggtcgtgatggaagataaccagtagctgattaattgccccgcaataaaggctcaccaccagccccgcgagaataagcgtaaccggcgaaagccgtttcccccacgcgacgccaaagacgattaagccaacgacacaagcgcccaccagtgcggcaaactggctcgccatagcacctgggatcgcccaaagtgtggtgacggtaattcccagttgcgcgcctgtagcaacgccaagtgtcgtcggttccgccagcggattacgcagcacttgctgaaacagcacgcccaccagccccaggcctgcgcccaccagcagcgaaatcgccagacgcggcaacaagctgtagtgaaaaatcatctgctcgatgacgtcaatatccggcgaccaggcggcctgcgcccactgactgcgcggcagcgcctgtgagaagttcatccaggttagcgccgtagcgacaatcactaacagcgccagcaataacgccgggaaaagcgcaattcgtttactcacgctttacctccgatggcgttatccagaacacgcacaaagtgcattgccgaaagcgttgcaccataaaaccagactgcgggtacgcgctgaaagcgccctgtacggacaaacggcatggcctgccacagcggggttgccattagcgcatccatgtctttgctgttgtcgtgatcaaaacagagcacatcaacgtctttatacgccgccagacgatcgatactgacggcggtactgccccagaagttggtttccccttgccaggcatttgggatgccgtactcatcgagaatttcctggaacaagctgtttggaccgaagaccagcatatggcgcggatcgataagcgtcgtcagcagtaacgggcgtgcaccacgcttcacaaagcggggtttcatgctgcggataaagtcttcgtattgcgctaaatgcgtttccgctgcgctttgcaggttaagtaaatctgccatttccgtcagcgatttacgcgccatcgccaacggctgtttgccgtcactgaagttaaatccgcgacccggcgcaatacgtgccagcatttctgatgaagggccatatcctgccgaccagaccataaacgacggtttcatttcggtcagcagttcaaggttaggttctgtacgcaaaccgacgtcaatcactgagtccggcaatggtggttcgctgacccacaggcgatagttgatggtatccgccacgccgtaaggcacgatgccgagcgccagcagtaattccaccggcaaccactccagcgccacaatacgattggggtcaatagccgccgcgtgggcggtattcatctgccataacaacggagaaagcgccatcgccgttaacagtcgacggcgcgaaataagaggtaagccgctcatcaataaacaaaactcacaggtgcagcacccgccggatgcggcaaaatacccatcgggatgccataaatcatttcgagggtttcgccgcgcataatttccgcaggcgttccctgagcaatcatttcaccaccgcgcagggcgaccagataatcacagtagcgtgccgccatattgatatcgtgcagcacggcaatgaccgtcaggccacgttcctgacttaaacggtgcaccagcgccagcacatcaacctggtgggcgatatccagcgccgaagtcggttcgtcgagcaacagacaacggctatcctgcgccaccagcatggcgatccacgcccgttgacgttcgccgccagagagactatcgaccagccgatgcgccagcggttttaagccaaccagcgagatagcttcctcgactttttcgcgatctgccgccccaaagcgccccagcgcgccatgccacgggtaacgaccaatcgccaccagttcacgcacggtcaacccttctgccggaggaagctgctgcggcaaataagccactttgcgggcgaacgctttgctgctccagctttccagcggctgggtatcaagaagaatctccccttccgtcggaggctgatgacggccaagcattttgagcagagtggatttaccagaaccgttgtgaccgatcagaccggtcactttcccggcaggaaaggttaacgacagcggatgcaaaagcgtgcgcccgggcacacgaaaggagatattacgcagtgcaaaagtggtatcggaatgattcgtgtattcctgcataacagccaacttgtgaaatgggcacggtaatccgtgccccaaaagagaaattagaaacggaaggttgcggttgcaacgacctgacgttctgcgccccagaagcagccataagtctggaagcaactggcaacatactcacgatcgagcaaattgttgacgttcacagcaaggctggatcccgccataccaaagcgtgccagatcatattttacaacagcatccattacagctgcgctacccactttaaaagtgtttgccggatcaccatagctggaaccaataaaacgaccacctgttcccaatgttaaaccagaaagcggcccttcattgaaggtataatccccccagagagatgccatatgctccggtacttgttctggagttttacctttgagattggtgtctttggtgtattccgcatccgtgtaggtataagaagccgtcaagttaatattggcatttaacgctgcttttgcttcaagctccacaccacgagcgcgaatctcacctgctgggacttgcgctaacgggtttgttgggtctgctgtcaggttatttgttttcgtcaattgatagactgcgcccgtaacaacgaccggcatatcattcggaacatattttacgccagcttcatactgttcacctttcgatggcttataggaaacgcgcgggttgctccacagatcgaaagcactcggttcaaaggactggctatagctaaagtaaggtgaaataccattatcgaataagtaatttacaccaccgcgccaggtgaactgatgatcattacgctcaatataaccttcagtcggcgtataagagttttcacgaacagtggtcgcttgcttagaccaatcgtagcgtccccccagagtgaatacccatttattccattccgcctgatcctgaacataaatacctgtttgtttgctttcattcatttggtatggctctgcgttaccaaatgcaaagtattcaggatgatatttgttataaagatcgattgatggtgcagatccaaagctggcattgatatcattgcgcatacgcatgaagtctacccctgtcagcaaagtatgctccacttcacctgtagcaaatttactttcaagttgggtatcaacgctaaagttttgcagacgctcattatccaccactgtcccgcggtttagagtatgaccatcgttggcaatccctgtgccataaacacttttctgtgaggttttcatttcactgaaacgcagattctgacgcacggtgaaggtgtcattaaaaccatgttcaaaactatatcccaccattttctggttacgggagtatgtattattcgatgcaccttcattgaagtcagtcggtagacgtttaccattaggcaatggctcaacggtcccctctttcggcaaccaaccgtaataacccgtttctggttcattctggaaataggacaggaaagtaaaattggttttgtcgtctggacgccatgagaatgatggagcaatggtataacgctgggattcagaatttttctgctgttcgtttgttgaacgagcgaggcccgtcaaacggtaggagaactcaccgttatcatccagtgcatcactgaaatcgaatccagtctgaaacagattatccgtccccattttaaactgaatttctttcaggggttcagtggtcggacgcttactcaccatagaaataatcccaccaggattactttttccatagagaacagacgtcggcccacgcatcagttcaaccctctcgagcatgtaaggatcaatcacagcatcgttataaaagttgccctgaagttttagtccatcaaggtaattattttgattcagaccaacagatgagaaaccacgaatgataacaaaatcatatgtattagaagcaccacgactgctaaccgtaacgccaggtgtataacctaatgcttcttttacagactgaaattgatgcatctgcatctcttcatttgtcacaaccgaaatagactgcggcgttttttcaattggtgtatccgttttagtcgcagtagcagagtgcttcgccgcaatagttgcagcaggcccccatgcgctttcttgcggcgcaggtgcagcggtaacggtgatagtgtcttctttcggttcaaccgctgcctgtgcataaacagacatgccgctaaccgctgtggctactacaactgcgattttacgcagtgagtgttttggctgagcagttttggaacgcgccattggtatatctctgatgtaaagtgaatgataacgtaaacgagaatgattattataaagataagataatattcgaaacgctggcgggttcgcaagcggtacgcaatctgagcgttcctgaagggttaataaacaaccagatgaaaagaaagggttaatactttaggtgggatgttattttaccggatggcaattcgccatccggtatttcacgcttagatgttaattactaccaaacatatccttgatccaaccggctacaccgtcgctgtctttctgctcttgctgagcaggttgctgttgcggctgttgctgcggctgagaagactgatcaaacggattgcctgacggttgctgctgcatctcactctgctggcacagcgattgcggatcgctggtccagaccggcaagacacgcatgccaccgctgcaaacaaagttgccgtcgtagtccacgcccatatctgcaatatcttctggcggaacaagattcagcggcgttggcgtctggttagccagataacgctgataaatcgacattgccccgctggcaccatacagtttggtcggctggttgttatcacggcctacccaggtgatggtcaccgtgctgccgtcaatgcccgcaaaccaggtatctacgttattgttggtagtccctgttttccctgccagatgcaggttcgggtatttcgccccaagctgacgacccgtaccgcgttgtaccacctgctgcatggtccatagtgtcagatacgccgcctgcgccggaacagcgcgttccgcctgcgggaagctctgatacagcaccttgccatcttccgcaattaccgaacgcagtgcagaaagcggtgcacggttaccgccgctggcgatggtctggaacgcctgcgccacttcgattggcgttaagttcaacgcccccagcagcatcgccggaaccggatgcaactgatctttcggtacgcccagtttgatccaggtctccgtaaccgcaggcagccccagcgccatccccagatttaccgtcggcacgttcatcgaacgggtcaacgcatccaccagcatcactctgccgctttcgctataacgacggtcatcattctgcggtgaccagacctggccattcggctgacgcagcgcgattggcgcatccgcaatccacgtattcagacgatagattttcggctggcttaaggcagtcagataagtcgctggttttgcaagggaaccaatcgaacgacgcgcctgcatcgcacggttgtagcccgcaaactgcggctcagaaccaccgaccatcgcacgaacttcaccactaaagcggtcgacgaccacaatcgcagtttcaagatcgctcaacttacgctgtttcttcagtgccggaatgccttccacggcggctttttctgccgcgtcctgggccaccgagtcaaaggtagtgaagatcttcacgccggagagatcttttaccttatcgcctaatttcgcctgcagctcctgacgcaccagttgcataaaggctggctgtggagagatcaccccaccgcgtggctgaacacccagcggacgtgcactcaacatgtcatagagttcttgatcaataatctgttgctgttgcagcagacgcagcaccagattacgtcgctccagcgccagttttgggttacgccacgggttgtagatggacgctcctttcaccatgccgactaacagcgcctgctggtcgaggcttagctcttctaccgggcgaccaaagtaatacaagctcgccagcgggaagccgcggatttcgttgtcgccgctctgaccgagatacacctcgttcatatacagctcaagaatacggtctttgctgtaacgcgcgtccatgatcagcgccatgtaagcttcgttcgctttacgccagtaagaacgctcactggagaggaacaggtttttcaccagctgttgcgtcagcgtactcgctccctgcaccgtgcgtccggcggtcaggtttgccagcaccgcacgtccgatggagtagaggctgatgccgtcatgctcgtaaaaatgacggtcttctgtcgccagcaaagtatccaccagcaaatcagggaaaccactgcgcggcacaaacaaacgctgctcaccgtttggcgaggagatcatggtgatcagacgcggatcaagacggaagaaaccgaactgacggttgttctccatattgacgatcgtcgccagatgatcgccatcaaaggtcagacgcgcacgcacctgcccttctttactgtccgggaaatcaaacggacggcggatcatctcaatgctgttggcctgcacggtaaattcgccaggacgggtcattttcgacacctgacgatactgagtcgcctccagcagcttcaccatctcgttcttgctgatggtcatatctggctcaaggttgaccattcggccataaactgccgcaggcagttgccagaccttgccatcaatacggctacgaattttttgatcgagataaacgccgtaaatggcgatcagcacggcaaaaacgatagccagttttaacagcagccatagccagccgcgtttgccacgaggcttacgccctttgcctttgcccttacctttgcgcggcatcggttcttcatcctcatagtcatcataatcgtcgtaatcatcgtcatcttcgtaacgacgacggcttaccttttgtttgaccggacgcgtcggtttccctttgcgtccaattggctcgcggtcattcccggccatgctttttctccgcaatattcaggcgcaaaagcccgattttctgttcttctgttacaagacagaagaagatatctctcaaaatttgtgctcgatcggtcccctctcccttgagggagagggttagggtgagggtgaacgtgcgcgctgatgccctcaccccggccctctcccacagggagagggagaaaaccaaccttacgaatactttttcgtccgtcgcgtcggtgcagtatttgccgggtcgtccggccagacatgtttgggataacgccctttcatctctttttgcacctcacggtacgctcctttccagaaggcgctcaaatctcgtgtgatttgtaatggcctttgggcaggtgaaagcaactccagcaccagcggcacgcgcccctgggcgatcgtcggattggtggcctcgccaaacatctcttgcattctcaccgccagcgcgggcgggttatcttcatgataacgaatggcgatccggcttcccgtcggcacagtgtaatgcgcaggcaattcactatccagacgttgctgcattccccaatcaagtaatccgcgtagtgcctgataaatgtcgagtgatttcaggccgcgtagtgaatgtacgccagtcatatgtggcagcagccacgtttccagcgtcgccaataaactttcatcatcaaccgctggccagtcatattccggcaaccactttgcggcgcataacaaacgcaagcgtagctgttccgcttccgccgtccagttgagcacgcttaaatctttatcgcggatgccattaagcatcgcctgatgcaactcgtcttccgagggtttcgccagcggctgcactttcaccgtcagcagaccgatttgcagccgacgccaggctttcagcgtaccttgcgcgtcatcccactccacagtgtcagactgctgtaccagctgcgggcagcgttgtactaactcatcaatatcgaccggcagcgccagtaaaatccgcgcatccggcgaggcgctgccctgcaataataacggtgcgatcaaccattcgtggcggcttagcgcgtcgttggcatcgagcatcgctcccatgccgtttgccagttgatagcgtccatcttgcccacggcgacgagcaatgcgatcggcaaacgccccggcaagtagcggcgcgataagcgaactgtctgcctcaccgccacgtacgtttaagcgttttaacagttgctgactacgttgctgccaggctggttgattgcgcgaaaacgccacgcccaggtcactattgcccatccgtggcggctcttcgagaatggcggcaatttttgccgcggtagcagcttcgtcgtcgttcttcgcgctaaccagcattgccgctaaacgcggatcgttacccagcgctgccattttttgcccttgcgcactaagccgttcaccctccagtgcccccagcatttgtaacagacgtttcgcggccagtagattcactactggcggttgatccagccagctcatctgcgccggatcgctgcatccccattgcagtaattccatcagcaaaccggaaagatcgctttgtaagatctccggttcactttgcgccgcggcgcgttctgcttgttctttggcgattaaatgcaggcagatacccggctccagacgcccggcgcgcccggcacgctgcgtcatggatgcctggctaacgcgttgagtaatcagtcgcgtaagccccgtgcgcggatcaaaacgcgccacacgctcctgggcacaatccaccaccagacgaataccttcaatggttaaactggtttcagcaatattggtcgccagcaccactttgcgcatcccttgcggtgccgggaggatcgcttttcgctgatcgttcagcgacaacgcgccatacagcgggcagagcaatacatcactgccgatgcgcgaagccagttgttcctgcacacgctgaatttctccgacgccaggtaaaaataacagtaatgatccgctttcctgacgcagcatttcagcggtggctaccgcaacggcatcgtcaaaacgctgatgcgcgggcagcggtaaataacggcgttcaaccggaaacgagcgcccttctgagatgacgacaggcgcttctggcagcatttgctgcaagcggtcgttgtccagggtagccgacataatcagcagtttaaggtcatcacgcagaccttgttgcacatcgagtaacagcgccaacgccaaatccgcctgcaagctgcgctcatgaaattcatcaaggatcaccagtccaacaccgctcagttccgggtcacgctggatcatgcgcgtcagcacgccttcggtaaccacttccaggcgggtattcggcccgacgcagttttgcgcacgcatccggtagccaacggtatcgcctggcttttcgttaagcagctccgccagccgttgcgcgacgttacgcgccgccagacgacgcggctccagcaggataattttcccgttaatgccgggatgcgccagcagttgcagcggcagccaggttgatttcccggccccggtcggcgcacttaataatacctgcggcgcacaatcgagagcggtaagtaattcagataagacggcagcaacgggcaacgacgacacaaaacgctccagagggttaacattcttcgcgccacattgtagcatcgcggtaattcataaccgagtgcctgaaccgcaacgtctgttctttgctatcgacttacctgcagaaatccgcgaacagattatccattggcgcgccacacacttcccacctgaggcgggacgtccggtcgccgccgataatttgcatctgactctggcatttttaggcgaagtgagcgccgagaaagagaaggcgctttctcttttagccggacggattcgtcaacctggtttcacactcacgcttgatgacgccggacaatggctgcgttcgcgtgtggtgtggttagggatgcgtcagcctccacgcggcttaatccagctggcgaatatgctccgttcacaggctgcccgcagcggttgttttcaaagcaatcgtccgtttcatccacatattaccttattgcgcgacgccagcgaggcggtgacaatcccgccgccaggttttaactggtcttatgcggtgacggagttcaccctttacgcctcctcgtttgcccgtggacgcacacgctacacgccgctaaaacgctgggcgctaacgcaataacaaggattgtcgcaatggaattctctccccctctacagcgcgcgacgctaattcagcgttacaaacgttttttagccgatgtgatcacacccgatggtcgcgaattaacgctacactgcccgaatacgggtgcaatgaccggttgtgcaacgcctggcgataccgtctggtattcgacttcagacaacaccaaacggaaatacccacacacctgggaattaactcaaagccagagcggcgcatttatttgcgtcaacacgctttgggctaacaggttgacgaaagaggctatccttaatgaatcaatttcagaactgtcaggctatagctcgctgaaaagcgaagtaaaatacggcgcagaacgcagccgtattgactttatgttgcaggcggattcgcgtccagactgctatattgaagtgaaatcggttacgttagcggagaacgaacagggatattttcccgatgcggtcactgaacgaggtcagaaacaccttcgggagttgatgagcgtagcggctgaaggccagcgtgcggttatctttttcgccgtgctgcattcagccattacacggttttcacccgcgcgccacatcgatgagaaatacgcgcaactattgtcagaagctcaacagaggggggtagaaattctggcttacaaagcggaaatttctgctgaaggcatggctcttaaaaaatcactgccggttacattgtagtaaagtaagtaactggttaatttacattctggtcgcgtgcgcaaatacgcttttcctcacacagttgtcaagtgttacgtttagataattgctatccggaaaagcatctgctatttatagcggcctcatttttcccccgaacatggggatcgatagtgcgtgttaaggagaagcaacatgcaagaagggcaaaaccgtaaaacatcgtccctgagtattctcgccatcgctggggtggaaccatatcaggagaagccgggcgaagagtatatgaatgaagcccagctggcgcacttccgtcgtattctggaagcatggcgtaatcaactcagggatgaagtcgatcgcaccgttacacatatgcaggatgaagcagccaacttcccggacccggtagaccgtgcagcccaggaagaagagttcagcctcgaactgcgtaaccgcgatcgcgagcgtaagctgatcaaaaagatcgagaagacgctgaaaaaagtggaagacgaagatttcggctactgcgaatcctgcggtgttgaaattggtattcgccgtctggaagcgcgcccgacagccgatctgtgcatcgactgcaaaacgctggctgaaattcgcgaaaaacagatggctggctaattacagccgttccatcacgtttaccacaggcgggaaatgctcccgccttattttttgttcaaagagatgacagacacacagtatattggccgcttcgccccctctccttccggcgagcttcattttggctctctgatcgccgcgctcggcagctatttgcaggctcgcgcccggcaaggtcgctggctggtacgcatagaagatatcgacccgcctcgtgaagttcccggtgccgcagaaactatcctgcgccagctggaacattacggtctgcactgggacggcgatgttctctggcaatcgcaacgtcacgacgcctatcgtgaagcactcgcctggttacatgaacaaggactaagttattactgcacctgtacgcgtgcgcgtattcaaagcattggcggtatttacgacggtcattgccgggtgttgcatcatggaccagacaacgccgcagtgcgtatccgccagcagcatccggtcacgcaatttactgaccagctgcgcggcattattcacgccgacgaaaaactggcacgggaagattttatcattcatcgccgtgatgggttgttcgcctacaacctggctgttgtggttgatgatcatttccagggcgttacagaaatagtgcgtggggctgatctgattgaaccaacagtaaggcaaatctcgctgtaccagctttttggctggaaagtgccagattacattcatctgccgctggcgcttaatccacaaggcgctaaactttccaannnnnnnnnngaatcatgcgcctgcgttgccgaaaggcgatccacgcccggtactaatcgcggcacttcaatttctggggcagcaggcagaagcacactggcaggatttcagcgtcgagcaaatccttcagtcagccgtcaaaaactggcggcttaccgccgtgcccgagtcggcaattgtaaattcaacattctcaaatgcgtcatgctgagctatgattagccgctatttttttgtcctgaatgatgtttgacactaccgaggtgtactatttttacccgagtcgctaatttttgccgcaaggtgctaagccgcgaggaaagcgaggctgaacaggcagtcgcccgtccacaggtgacggtgatcccgcgtgagcagcatgctatttcccgcaaagatatcagtgaaaatgccctgaaggtaatgtacaggctcaacaaagcgggatacgaagcctggctggttggcggcggcgtgcgcgacctgttacttggcaaaaagccgaaagattttgacgtaaccactaacgccacgcctgagcaggtgcgcaaactgttccgtaactgccgcctggtgggtcgccgtttccgtctggctcatgtaatgtttggcccggagattatcgaagttgcgaccttccgtggacaccacgaaggtaacgtcagcgaccgcacgacctcccaacgcgggcaaaacggcatgttgctgcgcgacaacattttcggctccatcgaagaagacgcccagcgccgcgatttcactatcaacagcctctattacagcgtagcggattttaccgtccgtgattacgttggcggtatgaaggatctgaaggacggcgttatccgtctgattggtaacccggaaacgcgctaccgtgaagatccggtacgtatgctgcgcgcggtacgttttgccgccaaattgggtatgcgcatcagcccggaaaccgcagaaccgatccctcgcctcgctaccctgttgaacgatatcccaccggcacgcctgtttgaagaatcgcttaaactgctacaagcgggctacggttacgatacctataagctgttgtgtgaatatcatctgttccagccgctgttcccgaccattacccgctacttcacggaaaatggcgacagcccgatggagcggatcattgaacaggtgctgaagaataccgatacgcgtatccataacgatatgcgcgtgaacccggcgttcctgtttgccgccatgttctggtacccactgctggagacggcacagaagattgcccaggaaagcggcctgacctatcacgacgctttcgcgctggcgatgaacgacgtgctggacgaagcctgccgttcactggcaatcccgaaacgtctgacgacgttaacccgcgatatctggcagttgcagttgcgtatgtcccgtcgtcagggtaaacgcgcatggaaactgctggagcatcctaagttccgtgcggcttatgacctgttggccttgcgagctgaagttgaacgtaacgctgaactgcagcgtctggtgaaatggtggggtgagttccaggtttccgcgccaccagatcaaaaagggatgcttaacgagttggatgaagagccgtcaccgcgtcgccgtactcgtcgtccacgcaaacgcgcaccgcgtcgtgagggtaccgcatgacagtggcgtatattgccataggcagcaatctggcctctccgctggagcaggtcaatgctgccctgaaagcattaggcgatatccctgaaagccacattcttgccgtttcttcgttttaccgcaccccaccgctggggccgcaagatcaacccgattacctcaacgccgccgtggcgcttgaaacttcgctcgccccggaagagttactcaaccatacacagcgcatagaactgcaacagggtcgtgttcgtaaagctgaacgctggggaccacgcacgctggatctcgatatcatgctgtttggtaatgaagtgataaataccgaacgcctgaccgttccgcactacgatatgaagaatcgtggatttatgctgtggccgctgtttgagattgcaccggagctggcgtttcctgatggggagacgttgcgtgaagtcttacatac

SEQ ID NO: 230 - DNA, 22437 bp, Escherichia coli
  source 1..22437: mol_type = genomic DNA
ttcccccagactttataagctaatttttttcgtgaaggttattgtcagatccaaaagcaaaaacccgccttgtgggcgggttcttaagaattagtggtgcccggactcggaatcgaaccaaggacacggggattttcaatcccctgctctaccgactgagctatccgggcaacggggcgcattaaacctgattcgcctcgtctcgtcaatcaaatttcttcaatttactgcagactgcacaatctatcatcactttgccgctattgcacgcattgtcaggcaaaccaggcggtccaggcggcggaaagcggcattgccagaaggagtgctggaagcatgttgaccaccgggaacattttaatgccacagatgcgtaatccggttgccagcagcaataaaccgcctacggcgctgaagtctgccatcatcgacggtgtggtcagcggtaatatcagcgcggcagcccacgccagcgttaactggatgatcagtaatgggatactaattaccgacaccgcaatacccagcgagcaggcgaagatcatcgccgtaaagaaatcaagaaatgacttggcgattaaaatactcggatcgccggtcatcccttcgttcatcgccccgaagatcccggtgccgctggcgcaaaacaggacaataatcgcgacataattctgaataaaagattcatgcgctggcttcttacgtgagtgacgaaacagattttgtgctttggtgactgctgtattgacacctttctccagcaaacaaatttcgccaattagagcgccaagtagcgtagctaaaaccatcgctggaaggttggcacatttcaccaccagtaaaataccaatccccagcgatgccagaccaaaaatagatgtcatggagacgcggatacgttccggtaagcgttggctgagcagtgcgccgagaacgccacccagtaatactgcactagcgttgataaaagggccgatgaccacaagagttcctgttaactgtattgtttgattttcttattatgaccgtttggtgccgtcgatggcttgtttgttcgcaaagtcctggcttgcacgctttagcgaaaggtgccatgattgcgcgaattttctcctctctgtacggagtttgcccgatgcacgccacctccttacattctctcgcttatcgccgtttcgcgcgaaacgtttccctttctatgttactgctcatgcggtgaagttaacgcacgctcactgcaggacaacagtaaaatcagagcgtttctgcttttactgatgtctggcggtcggagctggtgaccagtttgacccatatctcatggggcagggttttccaccttgtccggtattcttacttccccgaaacgggtttgcgcttatgaaatcaatgaatattgccgccagtagtgatctggtatcccgactttcttctcatcgtcgcgtggtggcgttgggagatactgattttacggacgtcgcggcagtcgtcattaccgctgcggatagtcgcagtggcattcttgcgttgcttaagcgcaccggttttcatctaccggtgtttttgtattccgaacatgctgttgaattacctgcgggcgttacggcggtaatcaacggcaacgagcagcaatggctggagctggaatccgcagcctgtcagtatgaagagaatttgctgccaccgttttatgacacgctgacgcagtacgttgagatgggcaacagcacctttgcttgccctggacatcaacatggtgcgttttttaaaaagcatcctgccggacgccatttttacgatttctttggtgagaacgtctttcgcgccgatatgtgtaacgctgacgtaaaattgggcgatctgcttattcatgaaggatcggcgaaagatgcgcagaaattcgcagccaaagtctttcatgccgataaaacctattttgtgctgaacggcacatcggcagcgaataaagtggtgacgaatgcgctgttaacgcgtggcgatctggtgctcttcgaccgtaacaaccataagtcgaatcatcacggcgcgctgattcaggcgggggcgacgccggtctatctggaagcttcacgcaacccgtttggtttcattggcggtattgatgcgcactgttttaatgaagagtatctgcgccagcaaattcgcgacgttgcgccagaaaaagctgagttgccacgcccgtttcgcctggcgattattcagctgggaacctatgacggcactgtctataacgcccgtcaggtgatcgataccgttgggcatctgtgtgattacattctgtttgattccgcgtgggtcggttatgaacaatttatcccgatgatggcggatagctcgccgctgctgttagaacttaacgaaaacgatccggggatctttgtgactcagtcggtgcacaaacagcaggcgggattctcacagacgtcgcagatccataaaaaagataaccatatccgcggacaggcgcgtttttgcccgcataagcggttgaataatgcctttatgctccatgcttctaccagcccgttctacccgctgtttgccgcgctggacgttaacgctaaaattcatgaaggagagagtgggcgtcggctgtgggctgagtgcgttgagttgggtattgagtcgcgcaaggctattcttgcgcgctgtaagctgttccgcccgtttatcccgcccgttgttgatggcaaattgtggcaggattatccgacatctgtgttagccagcgaccgccgttttttcagttttgagccgggggcgaagtggcacggctttgaaggatatgccgcggatcagtattttgttgatccgtgcaagctgttactcactacaccaggtatcaatgccgaaactggcgaatatagcgactttggcgttccggcgacgattctggcgcactatctgcgtgagaacggcattgtgccggagaagtgcgatctcaactccattctgttcttattaactccggcggaaagccacgagaagctggcacaactggtggcgatgctggcgcaatttgaacagcatattgaggatgactcgccgctggctgaggtgttgccgagcgtttataacaaatatccggtgcgctatcgcgactacaccatgcgccagttgtgtcaggagatgcacgatctgtatgtcagtttcgacgtcaaagacctacaaaaagcgatgttccgccagcagagtttcccgtcagtggtgatgaacccccaggatgcgcatagcgcttatattcgcggtgaagtggagttggtgcggattcgtgatgccgaagggcgaattgcggcagaaggggcgttgccttatccacctggcgtgctttgcgtggtacccggggaagtctggggtggggcggttcaacgttatttccttgcactggaagaaggggtgaatttgttgccgggattttcgccggagctgcaaggtgtttatagcgaaaccgatgcggatggcatgaaacggttgtacggttatgtgttgaagtaagaataaaaaaaacgggtcaccttctggcgacccgtttttctttgcgtaattagtggctaaccgtctgtgtgcctgtcgggacacgaacgtgtttatatttgaacatcgccatgaacgcgaaggccagaaccacggagtaaccagcgaaaatcaaccatacggtctgccagtcggtaatgccgttttgggtgtacatctcaacaactttaccgctcacgatgccgccgaggatacagccgaagccgttagtcatcatcaggaacatcccttgtgcactggcgcgaattgccgggctaacttctttttcgacaaacaccgaaccagagatgttgaagaagtcgaatgcgcaaccgtaaacgatcatcgacagtaccagcagtacagtaccgaacggagtcgggtcgccgtaagcaaacagcgcaaaacgcaggatccacgccacaatactgatcatcattacgttcttaataccgtagcggcttaagaagaacgggatggtcagaatgaacagggtttcagagatctgcgaaatcgacatgatgattgacgcatgctgcacaataaagctgctggcaaacatcggatctttgtcgaagctgtgcaggaaggtattaccgaacatgttggtaatctgcagttccgcgcccagcagcattgagaagataaagaagattgccatacgcttgtttttaaacagcgcgaatgcatcgaggcccagcagggttgtccagctctgattcgcttgctgtttagcaaccggaatatgcggcagagtcagggtaaacagaaccagaatggcggaaagtgctgcgccaatatacagctgcatgtggcttaattcgaagccagacaggctcaccacccacattgccatgataaagccgatggtgccccagatacggattggcgggaagtcagtaacgatatccatcccggcattttgcaggcgatagtaagagatggtgttgattaacccaagcgttggcatataagcaaacgagttaatcaatatcacaaggaacatcgcctccggtgtcgtgacctgtgccgccatgaacagcgtgatagcgccaatggtgtggcaaatggcatatacccatttcgcacttaaccatttgtcggccacaatccccagcagcgcaggcataaataccgcggcgatacccagtgagctataaactgcgccaatagaagcaccgtcaaacttcagggtaacaaacatataggagccgagggtcgtcagccaacttccccacagacagaactgcagaaaagagaggattttcagctgcagcttaagattcatgttaatttcctcacatcgtgatgcggatgagtgtttgaaaaagcacatttgaccgtgcgagatgatgggattctatcaacttcgcggactggttttttgttacctgtggcaaataattgcaaacattcccaatttgcaaaacgaaattgtgatgtggataacatttttgcccctgagcatcgtcaggggcggttaatggaattatcggcggcggtaggatttttgcgcggtattcactttataaagataacggcgagattccgcagagggatggcgggtcgtcagcgtctgataaacatcgcccggcgtcatggtgttaataatattggcagcctgaatcttatcattcgaaaagactcgcagcacgctgcctgcgccgccgttataggcggtgatgacggcataacgccgcgatgttgggttatcaattccgccgagataaacattgttcagcatcgccagatacgcggtgccggtatcaatattgctggcaggatcaaacaagaaactgcggctcggcgtgccggatttcccctgcgagcggaacacatctttcccggcagtatgttgtaccacctgcattaatcccagcgcatcggaacggctgaccgcatatgggttaaaggaagattcggtctgcataatcgccagaatcagcgactcatcaacgccatatttccgtgacgcctggcggaccatgccgagatatttgtgcgcacgtttatcaaggtggttcggcaccatgttaatggtaacgctgtagatgatacgcagcccgttgctgcggctcttcagacggtttttcagcagataatccgcgaagttgctcgcgcgaccttcccagcgaatcggctgcccggtgttgtccaccacctgaccgtaaaggaaaggttctttcgaaatcgtaatatcatcaacgtcggaatagagatcgaccgaactcggatcgtcacccatcagcaacgttttgataattgcccggcgcaaatgcgcggcaggttctgtcccggcgatagtttcgatagtaatcgtaccgtcatcgaagttgatgtggctgcgggtctgatattgatcggtgtatttcacgtagtccttaggaccggcgatcaccacctctttgaatccccagatgttctcaatattgtgggcaaattgccccatcagaatatcaaaaccgttggtatctttgacccaggcttcgttataggtatcgccttttttggtcgtcgaacaggagatgagcaacggcgcaattaaagccagcgcgagatattttttcatcattccgggtgcgtgttgtgtttgtttttatgcaagttgccggaggcgtgctccggcactgtttttattttttatcttccggcgtatagccctcgatatgcacctctttaccctcgaacaggaagttgaccatctcctgctccagcagcttgcggtgctcggcattcatcatgttgagtttcttttcattaatcagcatggtttgtttgtgctgccactgcgcccaggcttctttggagatctcgttatagatgcgttttcccagctcgccggggtacagctgaaaatcctgaccttctgcttcacgttgcaggaaagtacaaaaaatcgttctgctcataaatcatcctctttatcgactcacgcgctaaaccggcgcgccagtgcgtaactgctgtaacaaacgctccacgggagccgccaggccaactgacggcggttgcgctaagttataccagagcgcattgccttcatccatgcagccggtgaatgacgacacgggaagccacataggcacaatatctaagtggaaatggctgaaggtatgccgaaacgcggtcagctgcgtcaggttatcggcagcaatctgccgttgcgccagccactgccgcaaactttcttcgtcggcaaactgcgggaaacagtataaaccgccccacaatccgctcggcggacgctgcgccagcaatacttcatcttcgtgctgtaacaggagaaagtagccggtgcgctccggcagcgtctgtttcggttttttgcccggataaagcgaccagctattgttggcggcggcaatacatccgttttgtagcggacagagcgaacatttcggtttcgagcgcgtacaaatcatcgcacccaaatccatcatcgcctgattaaaccgttccacgccaaccgcgggcgtcacctgctcgctcaaactccataatttattctcgacctcttttttccctggccagccgcttacagcatagcagcgcgccagcacccgtttgacgttaccgtcgagaatcggaaagtgcttacccagagaaagcgagagaatcgcacctgcggtggaacgcccgacgcccggtaacgccgcgacttcttcaaaggtttccgggaatttaccgccgtgtaaggtcgccacttgttgtgccgctttatgcaggttgcgcgcgcgggcgtaatagccaagcccggtccacaagtggagaacttcgtcgagcggcgcattggcgagatcggtcaccgtcgggaagcgcgccataaagcgttcaaaataggggataacggtcgcaacctgagtttgttgcaacatcacttctgagagccatactttgtagggcgtcttgtcaatttgccagggcagcgttttccgcccgtatttatcgtaccagtccagaacctgggctgaaaattgcgacgcttgcatggtcaccgaattcactgttgttgggggcaagattgcagcacagcgacggcagggtgtaaaccggaactttccgcagccacggccttatcatgcttgcatccggcaactaactttggataatgcccgttttcagaacactttcacaagcgactaaatctttatgaaaaacgacgtcatttcaccggaatttgatgaaaacggccgcccactgcgccgtatccgtagttttgtgcgccgccaggggcgactgaccaaaggccaggaacatgcgctggaaaactactggccggtgatgggcgttgagttcagcgaagatatgctggatttccccgcgctttttggccgtgaagcgccggtgacgcttgagattggttttggcatgggggcatcgctggtggcaatggctaaagatcgccccgagcaggacttcctcggcattgaagtgcattcaccgggcgttggtgcgtgcctggcttctgcgcatgaagaaggtttaagcaacctgcgagtgatgtgtcacgatgcggttgaagtgctgcataaaatgattcctgacaattcattgcgcatggtgcagctctttttccctgacccgtggcacaaagcgcgccataataaacgccgtatcgtacaggtgccgtttgccgaactggtaaaaagcaaactgcagctggggggggtattccatatggcgaccgactgggaaccttatgcggaacatatgcttgaagtgatgtcttctattgacggttataaaaacctgtcagagagcaatgattacgtaccgcgtccggcatcacgtccggtgacgaaatttgaacaacgtggtcatcgtcttggtcacggagtatgggacttaatgttcgagagggtgaaataatggcaaagaaccgtagccgtcgtctgcgtaaaaaaatgcacatcgacgaattccaggaattaggattttcggtggcatggcgattcccggaaggtacatcggaagaacagattgataaaaccgttgatgattttattaacgaggttatcgaaccgaacaaactggcctttgacggcagcggttatctggcctgggaaggtctgatctgcatgcaggaaatcggcaaatgcaccgaagaacatcaggcgattgtgcgtaagtggctggaagagcgcaaactggatgaggtacgcaccagcgaacttttcgacgtttggtgggactaagaaagcatacgggcgatgacaaatgcaaaactgcctgatgcgctacgcttatcaggcctggaaagatgcacgatcgagtaggcgggataaggtgtttacgccgcatccggcatggaaaacgcgtactttgttatcaatctggggccagcaaatgctggcctgattttttcttgagggaagactatgatgcgcaaaatgctgctggcggcagcactttcagtgacggcaatgaccgctcacgccgactaccagtgcagcgtcacgccgcgtgacgatgtgattgtcagcccgcaaaccgtgcaggtgaagggcgaaaacggcaatctggtgatcacgccagacggcaacgtgatgtataacggtaagcaatattccctgaatgccgcccagcgcgagcaggcgaaggattatcaggctgaactacgcagcacgctgccgtggattgatgaaggcgcgaaaagccgcgtcgaaaaagcccgtattgcgctggataaaattatcgttcaggagatgggcgaaagcagcaaaatgcgcagccgtctgaccaaacttgatgcgcagctgaaagagcagatgaaccgcattatcgaaacgcgcagcgatggcctgacgtttcactataaagccattgatcaggttcgcgccgaaggccagcaattagtgaatcaggcaatgggtggaattttacaggacagcattaatgaaatgggcgcgaaagcggtgctgaaaagcggcggtaacccattacagaatgtgctgggaagcctgggggggctgcaatcctcaatccaaaccgagtggaaaaagcaggaaaaagatttccagcagtttggcaaagatgtttgtagccgcgttgtgactctggaagatagccgcaaagccctggtcgggaatttaaaataatcctctattttaagacggcataatacttttttatgccgtttaattcttcgttttgttacctgcctctaactttgtagatctccaaaatatattcacgttgtaaattgtttaacgtcaaatttcccatacagagctaagggataatgcgtagcgttcacgtaactggaggaatgaaatggagtttttcaaaaagacggcacttgccgcactggttatgggttttagtggtgcagcattggcattacccaatatcaccattttagcaaccggcgggaccattgccggtggtggtgactccgcaaccaaatctaactacacagcgggtaaagttggcgtagaaaatctggttaatgcggtgccgcaactgaaggacattgcgaacgttaaaggcgagcaggtagtgaatatcggctcccaggacatgaacgataatgtctggctgacactggcgaaaaaaattaacaccgactgcgataagaccgacggcttcgtcattacccacggtaccgacacgatggaagaaactgcttacttcctcgacctgacggtgaaatgcgacaaaccggtggtgatggtcggcgcaatgcgtccgtccacgtctatgagcgcagacggtccattcaacctgtataacgcggtagtgaccgcagctgataaagcctccgccaaccgtggcgtgctggtagtgatgaatgacaccgtgcttgatggccgtgacgtcaccaaaaccaacaccaccgacgtagcgaccttcaagtctgttaactacggtcctctgggttacattcacaacggtaagattgactaccagcgtaccccggcacgtaagcataccagcgacacgccattcgatgtctctaagctgaatgaactgccgaaagtcggcattgtttataactacgctaacgcatccgatcttccggctaaagcactggtagatgcgggctatgatggcatcgttagcgctggtgtgggtaacggcaacctgtataaatctgtgttcgacacgctggcgaccgccgcgaaaaacggtactgcagtcgtgcgttcttcccgcgtaccgacgggcgctaccactcaggatgccgaagtggatgatgcgaaatacggcttcgtcgcctctggcacgctgaacccgcaaaaagcgcgcgttctgctgcaactggctctgacgcaaaccaaagatccgcagcagatccagcagatcttcaatcagtactaatcacctcgccccggtatcgtgccggggctttttcacttcagacttacgtccattgccaattttcattaccctaatgataatcaccggaataaattattccgcgtgaggtttttcgggtgaaaaagcaatggattgttggcacggcactgcttatgttgatgactggtaatgcctgggcagatggcgaaccgccaactgaaaatatcttaaaagatcaattcaaaaagcagtatcacggcattctcaagcttgatgctatcaccttaaaaaatcttgatgctaagggtaatcaggccacctggtcagcggaaggcgatgtctcttccagtgacgatctctatacctgggtcggtcagttggcagattacgaactgctcgaacagacctggacgaaagataaaccggtaaaattctcggcgatgttaaccagtaaaggaacgcccgcgtctggctggtcggtgaacttttactcttttcaggcggcagccagcgatcgtgggcgggtggtcgacgatatcaaaacgaataataaatatctgatcgtgaatagcgaagatttcaattatcgctttagtcagcttgaatctgcgttgaatacccagaagaactcgattcctgcgctggaaaaggaagtgaaagcgcttgataagcaaatggtggcggcgcagaaagcagcggatgcatattggggaaaagatgcaaacggtaagcaaatgacccgcgaagaagcctttaaaaaaattcaccaacagcgtgatgagtttaataaacagaacgatagcgaggcgttcgcggttaaatatgacaaagaggtttatcaaccggcgattgcggcatgtcataaacagagtgaagagtgttatgaagtgccgattcagcagaaacgagatttcgatatcaacgaacaacggcgacagacttttctgcaatcacaaaaactcagccgtaaattgcaggatgactgggtaacgctcgaaaaagggcaatatccgttaacgatgaaagtttcagaaataaacagtaaaaaagtcgcgattttgatgaaaattgacgatatcaaccaagctaatgaacgctggaaaaaagataccgaacaactgcggcgcaatggggtgattaagtaagtttgatatagtgcacgatttgtagcaggatgcggcgttgaccccgcatccggcaatcaacgtctgatgcgacgcttgcgcgtcttatcagacctacaaccgctgccacatgtcggctggataaggcgttcacgccgcatccggcaatacaagtttactcagccagaaaaagctccagcagcgaatttaaaaacagcttcccatgttccgttatctgccagtaatccgcacattcggtgagataaccctgggcaatcgcctcgtctaactgtgggcgaatcacatcttcgcaaagcccggtatacgcactaaactctgcgcgtggcgcggcctccagcaagcgaaagcggttcataaagaactcaaacggcttatctgcggcttcgacatcacgctggctttccagataccttccttgcataaaaccacgcggatgacgcgttttagtggtacgcagaatgcgcccatccgggaaggtcactttgccgtgcgcgccgcagccaataccgatgtagtcgccaaagcgccagtagttgagattgtgctggcactgataactgggtttggcgtaagcggaagtttcatattgctgataacccgctgcggttaataactgatgcccctgttcgaatatatcccacagcgcgtcgtcgtccggcagtaccggcgggcgtgaaccaaacagcgtattaggttcgatggtcagttgataccaggaaagatgcggcggattcagttcaatggcctggcgtagatcgccaagcgcctcttccagtgattgatccggtagtccatgcatcaaatcgaggttaaagctacgcagccccagcccgctcgccagctttgccgcgcgtttcgcttcttgcgggccatgaatacgcccaagtcgtttcagcttttcttcgctaaaactctgcacaccaatagagatgcggttcacaccagcacgctgataatcgacaaagcgatcggcttctaccgtaccagggttcgcttccatagtaatttctgcatccgctgccagcggcaaacgcgcacgcacgccgtccagcagcgtttgcatcgccgggccggaaagcaggctcggcgtaccaccgccaataaagattgtctttacttcacggccctgagcgtaagccacatcattgtccagatcgcaaagcagatgctgaacgtaatcgtcgtgcggcacttctcctttcaacgcgtgagagttgaaatcgcagtacgggcatttctgcacgcaccacgggatgtgaatgtagagactcagcggcggtaatttaaccattacgtaaagcgtccaacagcagtttcaatgcctgaccacggtgggaaatggcgctcttttcttcgcgggtcagttcggcagcggttttcccttcggaaggtacgaagaagattggatcataaccaaagccaccagtgcccgctggttcacgagtaatcacgcccggccagctaccgtggcacaccagcggagtcggatcttccgcgtgacgcagatataccagcacgcagtggaaacgcgcctgacgttggtcgtccggtacgtctttcagtgtttccagtagtttttgcagattctttagatcggtcgcgtcttcaccggaataacgcgcggagtaaatgcccggcgcgccgccaagcacatctaccgccagaccagagtcgtcggcaattgccggtaaaccggtcacttttgccgcatggcgcgctttcagaatcgcgttttcgataaaggtcaggccggtttcttcagcggaatctacgccgaggtctgtttgggccacgatatcaagaccgaagtcgctaagcagcgacgccagctcacgcactttaccggcattgccggttgcgaggacaactttttgcataggatacctaattaattaacgccgcgatttctggcgggatttgttgcggattaatgattttaatttgtttgtggcggccaagttcgcctttttcaatcaccacctggcttttggcaacccggaattgcttaccgagaaacttcaccagatgactgttggcctggccgtcaaccggcggcgcggtaatggcgactttaacttcgtcgccatgtaaaccgacaatagaatcacggctggctttcggctgaatatagagccgtaaaaccagaccgtcatcattaactgttacggcactcataacgccatccacagccccggcagcagcatgtttccggttgcctgtaatacttctgcgacacccatattgatgacatacagcagcagaacgaggatcatcggcgagaaatcaatcccacccattgccggtagcaggcggcgaatcgggcgcagcagcggatcggccagctgaatcagcacgtattcaatcggactacgaccctggcttacccagctcataatcgccatcaccagcaggacccagaaaatcagcaagccgatggttttcagcagaatcagtaaaccggcaatccagatgattggcaggaaggtcaccactttaaacagcacaatggctttgataaaactgagaatataggcaaccagcagcgaggcgctgtcaatgggacccattgccggaataacgcggcgcagtggcccgataattggctgcgttaccttcactacaaactgtgagaaggggttgtaaaaatcacaatgagcccactgcatccagatgcgtaataacagcaccatggtatacagctcaatgaccgttgaaagcaggaaagtcaacgtattcatggcgttcctttaattccttattttttagagtaatcacgcgcaccaaaaattgcagtgccgatacgaaccatcgtgctacctgccgcaatggcggcttccatatcgtccgacattcccagagagagcgtgtcgatatgcgggtagcgcgttttcagtccggcaaatgctacagccatttggcgtgcaacttcaaactgccttacatattctgactcaggcgcagggattgccatnnnnnnnnnnnnnnnnnnnnnnnnnnnnnnnnnnnnnnnnnnnnnnnnnnnnnnnnnnnncgtaaacgcggtagttcagcgaccgccgctgccagctcgtccagttctgccagttgaatcccggacttactgttttcatcactaatattaatttgaatcagtacgttaagagggggaagttctgccgggcgctgatcgttgaggcgggtagcaatgcgcaaacggtcgatggtatgacaccagtcgaaatgctctgccaccaggcggcttttattagactgcaacgggccaataaaatgccattctaatcctgttacgcccagttcctgaaagtggcgaattttatctaccccttcctgaacgtagttttcaccaaattgacgctgcccggcatcaatggcttctgcgatggcgctcgcaggttttgttttactgactgcaagcagcgtaatttcttctggagaacggccgcaacgcgttgcagccgctgagattttgtcccggacctgtgccaggttatgcgcaatatcgttcattttccgaggatcttagtatgaatatggaagaaattgtggcccttagtgtaaagcataacgtctcggatctacacctgtgcagcgcctggcccgcacgatggcgcattcgtggcagaatggaagctgcgccgtttgatgcgccggacgtcgaagagctactgcgggagtggctggatgacgatcagcgggcaatattgctggaaaatggccagctggattttgccgtgtcgctggcggaaaaccagcggttgcgtggcagtgcgttcgcgcaacggcaaggtatttctctggcattacggttgttaccttcgcactgtccacagctcgaacagcttggtgcgccaccggtattgccggaattactcaagagcgagaatggcctgattctggtgacgggggcgacggggagcggcaaatctaccacgctggcggcgatggttggctatcttaatcaacatgccgatgcgcatattctgacgctggaagatcctgtggaatatctctatgccagccagcgatgtttgatccagcagcgggaaattggtttgcactgtatgactttcgcatcggggttgcgggctgcattgcgggaagatcctgatgtgattttgctcggagagctacgtgacagtgagacaatccgtctggcgctaacggcggcagaaaccgggcatctggtgctggcaaccttacatacgcgtggtgccgcgcaggcagttgagcgactggtggattcatttccggcgcaggaaaaagatcccgtacgtaatcaactggcaggtagtttacgggccgtgttgtcacaaaagctggaagtggataaacaggaaggatgcgtggcgctgtttgaattattgattaacactcccgcggtggggaatttgattcgcgaagggaaaacccaccagttaccgcatgttattcaaaccgggcagcaggtggggatgataacgtttcagcagagttttcagcagcgagtgggggaagggcgtttgtgacgttgccatgcccgatgtgcaagcttatcgggcctacaaaggcaataaacgtctgatgcgacgcttgcgcgtcttatcagacctacaaccgctgccacatgtaggccggataaggcgtaaggcgcgatgatattatacactccagcaggcgtttaaatcgctttaatatccctgctcgaaatagctttcgagaataataaccgcagaggcagagtcgactttgcctttatttagcgcccgatagccgccctgttcaaacagaccggaacgggcttccacggtgctaagacgttcgtcatggagctttacttcaacaccgaaacgaccatgaatacggttggcaaatttacgcgctctggcagtcaatggttgctcggtgccgtccatattcagcggcaaaccgacgatgatttcgtccggctgccactctttcagtaaacgctcgataatgttccagtccggcgtaccgtcctgtgctttaattgcaggcaaagggcgagcggtgccggtaatgcgttggccgaccgctacaccaatgcttttggtaccgaagtcgaaggcgagtaaggttccactcatcaggcgtgccctgccacaccaggcatggtgagaatatccacaccaatcagttttgccgcctcgcgccagcggtcggcaatcggtgttttgaacagaatattcagatccgccggggccgttagccacgcgttatcgagaatttcttgttccagttgacctttttcccaggaggcataacccagagccaccaatacgtcagacggttgtttatcggtgccgagcgtttccagcacatcgcgggaagtggtcatcactgtgttgtctgaaatgcgaatgctggaagcaaaattggagggcggagtatgcaaaataaacccgcgatcttcagccagcggaccgccgagcataaccggtttatccagacggattgattcatcacgcggctccggcgtgatcttcagcttttccagaatcccttcaattttgagattttccagcggcttgttgacgatgatccccattgcaccattggtattatgttcgcaaatgtagaccacggaacgacggaaaatcggatcctggagagcaggcatggcaataagaaagtgatgctgtaaattcattgtcagaggttctgtttcctggttcaaaaaagcaacagcgcccagtatgcgtggaaagaagggcgctgtcactcagagtctcaacgagatccttctcgctaaggtgggttactgctgctgtaaacgtgcttcgatggcatccattaacattccggtgatcgacaccggaaactctgcttcaatctcacgaatacaggttgggctggtgacgttaatttcagtcagacggtcgccgatgatatccagaccaacaaaaatcagccctttttctttcagcgtcggcccgatctgacgggcgattttccagtcactttccgtcagcggacgaggttcaccgcgtccaccggcagccagattgccacgggtttcgcccccctgcggaatacgcgccaggcagtacggtaccggctcgccatccaccaccagcacgcgtttgtcgccatctttaatggctggcaggtaattttgcgccatgcagtagcgagtgccatgctcagtcagggtttcggcaatcacgccgaggtttggatcgccttctttcacgcggaaaatcgacgcgccgcccataccgtccagcggcttaagaatgatgtcgctgtgtttctcccagaacgcttttagctgcgctttattgcgcgtaaccagcgtttctggcgttaagtcagagaaccaggcggtaaacagtttctcgttacagtcgcgcaggctctgcggcttgttaacgatcagcgtccctttctcttcggcacgttccagaatataggtcgcgtagataaactcggtatcaaacggcgggtctttacgcatcaggatcacatcgagatcggccagcggcagatcctgttcaccgacgaatgaaaaccactcttcgtagttctgcttcacgttcagcgtgcgggtatgggcgcgggcttcgccattgatcagatacagatcgcccatctccatatagtgaagttcgtaaccacgacgctgtgcttccagcaacatagcgaaactggaatctttcttgatgttgatgtttgcgatggggtccatcacgatgccgagcttgatcattattcttctccgttagcccaaatcgccaaatcgtacttgtagcgcggtaatggcggtgagcgcagttgtctctgtacgcaaaacgcgaggtcccaacaggatatcagtaaattgatagcgggcagtcatggcaatttcatctgccgataaaccgccttccgggccaatcagcaggcggacgcgttcaaccggtaacggcaacgtattgatgctgttactggcgcgcgggtgaagattcagtttcagtccttcatcctgctctgcacaccaggcttccagatccatcgctgggcggatttccggcacccggttacgaccacactgctcacaggcagcaattgcaatcttctgccactgctggagcttcttgttcagacgttcactatccagtttaacgccgcagcgctcagaaaaaagtggcgtaatgaggcttacaccgagttcgatcgatttctggatcgtaaattccattttttcaccacgcgacatcacctgaccgaggtgaatatgcagcggagattcgcgatcgtcgatcttgccttccagcaccttcacttccacgctttttttgctggcgctggtaatttcggcgtcaaagacctggttgctaccgtcaaacaattgcaacgcctgccccggccccatgcgcagtacgcgcccgatatggttggcggcatcttcgcaaagcgcgatgtgagaatggctggtcagtggttcaggatgataaatgcgggggatacgcatagttaaaaatccgcgtcgtctccccacgcggttgtacgcgtggggtaggggttaacaaaaagagtcccgctagtgtaggttagctctttcgcgcctggcaagcgcgttgcacatacgggttatgattgccttgcaccttcgcgatgcgttcatcgcgctcgcactcccagtcggtaaccggatacatcttgttccatgcgttgaacagctgcgtttgctggcgagagagtgtcaggttgtattggtcgcgcatatagaagtaggtgcgcgcaatggcaccgcgtgcacgcgctggtggttcggcagctttttctttgaaatcgaccttcatggcgcattgaccgtactggccttcgccgccattccactggctgtacataaagttgccgcgatcgccattcacctcaccgactgacggctgcaggttatgcatatcgctttccatcttgcgatagaccggatctttagcgcagtttttacgtccaccgtcctgccagcactggcgctggtgaccgaactgccaggcgggaacgacgtgttcccactctacgcggctggctcggttttcatttttgcgcacctgatagccgcacgattgcagatcaacaacgccttttttgccctgccagttaattttacatccgcaataaaacgtaccgggcgcgtcagcgtggacttttaccgccgcggctttcgcctgagaaaaactattgataccttcggccaacgccgggccggaaaatgctgcgctcagtaccaccgcagcaatagacaaataacggtacatcacttactccgtgttaaaacgagccagcaacgtagcgaaagttgttttggtatgcaatcagccagatcaggaaagttcctgatagttcagatggttatttcgcaaccagctgttcaccgcagtgaacacagcgatagacggcctcgccacgaactacgcgattatggcggcgtacggtaagctgatgctcctggcacttgcagcggtaggggaaggtgttgcgacgcacggattgcagttcgaactgatgcgtacgacgggcgggaacgcccagcacgctttccatcatccacttccactctttgccatgtggcgctacgcggccgaaatgtttccataccagcaaatgtgccagttcgtgcggtaccacttcttcaataaaagcttcactgttttccaacagcaaaacgggattgaggcggatttcatagctttccagccaggctgttccggcggaggttccgcgctgggtgtaagagagttttggctccgggtagttacgccctagcttcaggttggcctgggcgagtttttcccgcaggcggcgcataacggcctgctggatggcgatagggagacgggatgttttcatagcggcagaggatagagcgaagaaaagatgactgcaagaggtggcttcctccgcgatgggaggaagcctgaggagattaatcgtgagcgccgatttcgcgcagtttacgacctttcatcagattacgttcaatatgttccagcgaaacgtgtttggtttccggtaccagccacaatgtcagcaggataaacagtacgttcagagccgcatacacccagaaggtgttggcgttacccagcgtgttgagcatggtcaggaacgttgcgccaacgatcatgttggcaatccagttggtggcggtggagcaggtgatgccaaaatcgcggcctttcagcggctgaatttcggagcacagtacccaaatcagcggaccggcactcatggcaaaaccgacaataaacatcagcagcatggcgatggcgaaatactgcgctgacggagagtgaataccgatatgcatcattgtaccgagtacgcccatgccagcagccatcaccaggaagcccagcgttagcgttggtttacgtccccagcggtcaacaaggccgattgcgataaaggtggcaagtacgttggtcaggccgacaatcacggtcccccacatttgctcggtagtgttggtataacccgccagttcgaagattttcggcgcgtaatacatgatgacgttcatcccggtgaattgctgcattacctgcaacagtacgccaaggaacaccgcgcggcggaagttgctgttctctttaaacagcgcccagccactctgtttaacctgcaaactttcacggatttcatccagttcgcgtttcgcttccgcgctggtgtcacgcaggcgtagcagcacgcgttcggcatcaacaaaacggcgcttggcggcaaaccaacgtgggctgtctggcaggaagaagacaccaatcagcagcaaaattgccgggatgataatcacacccagcatccagcgccatgcaccggtgtagctgaaggcggtatcagaaagataagcaccgaggatcccgatagtgatcatcaactgatacatcgagatcatactgccgcgaattttttccggcgcaatttctgacaggtacagtggtgcggtataagaggccacacccaccgccagccccagcagaacgcgggaaagaatcagtacttcaacgtttggcgcagccgcagagaacagcgaaccggcaacaaacaaaattgcgccgatcatcaggctctttttgcgcccgagtttaaaggagagccagccgctgcccaccgcaccgactgccgcaccgaacatcatggagcttacgacccattcttgcgtgtgcgaagtaatctggaattcatctgcaataaacggcagtgcgccagcaattacaccgatatccaggccaaagagtaatcccgccagagcggcaaggaagcagacgaaaaaagtcattgccttgtttgaccgcccctgttttttagcgtcaggcatgatgccctccaatatggttattttttattgtgaattaagataggtgagtacgacgtaaaaagatgtgaagcaaatcacatcagtgtaatcgcttacactaacatttatcttagttatggtttaagtgcatgaaaataattgagttatatcatcatagat

SEQ ID NO: 231 - DNA, 22409 bp, Escherichia coli
  source 1..22409: mol_type = genomic DNA
ttgctcatcgtgggatctatgctgtgaaatcagcggttattgtgcgatatcggacacgctttcggcaatgtgaattgcatgttatttacatttatgtaacttaataaataatcgtcctcaaatcaaattaaaagtcaataggttgaaataactccaggaatttgctgatattccgccttcagagggtttgctatgatcagcggttactgtgatgtgcttaatgatgctcaagttaaactccacgcttgccgatagccaaccgcagaatcatgtattgtgtctggtgcgactgaccacgcctgacagactaagtaagatggggaaagcatgagcaccattgtgatttttttagctgctttgctggcctgctcactacttgcgggatggctgataaaagtgcgatccagacggcgtcagctgccctggaccaacgccttcgcggatgcgcaaacgcgtaaactcacacctgaagaacgtagcgccgttgaaaattatcttgagagcctgacgcaggtattacaggtgcctggcccaacgggagctagcgcggcaccgatctctctggcgctgaatgccgaaagcaacaacgtcatgatgctgacacacgctatcacgcgttacggcatctctaccgacgatccgaataaatggcgttactacctcgattcggtagaagtccacctgccccctttctgggaacaatacatcaacgatgagaataccgttgaactgatttataccgattcgctgccgctggttatttcactcaacggtcatacgctgcaggagtacatgcaggaaacgcgcggctatgccttgcaacctgttccgtccacgcaggcgtcgattcgcggggaagagagtgagcaaatcgagctactcaatattcgcaaagaaacgcatgaagaatatgcgctgagtcgtccgcgcgggctgcgtgaagcgttgctgatcgtcgcctccttcctgatgttctttttctgcctgattaccccggatgtatttgttccgtggctggcaggcggcgcattactgctgctgggcgcaggtctgtgggggctattcgcgcccccggcaaaatcctccctgcgagaaattcattgtctgcgcggtacaccccgtcgttggggattgtttggcgaaaacgatcaggaacagatcaacaatatttcactcggtattatcgacctggtctatcccgcacactggcagccatacattgctcaggatctcggtcaacaaaccaatattgatatctatctcgaccgccacgtagtgcgtcaggggcgatatctttcgctgcatgatgaagtaaaaaactttccgttacagcactggctgcgcagtacgattatcgctgcgggctcgctgctggtgctgtttatgctgttattctggatcccgctggatatgccgctgaaattcactctctcatggatgaaaggcgcgcagaccattgaagccaccagcgtaaaacaactggctgacgctggcgtgcgggtaggcgatacattgcgtattagcggtacgggaatgtgtaatattcgcacttccggaacctggagcgcgaaaaccaattcaccttttttaccgtttgactgctcgcagatcatctggaatgacgcccgctcattaccattaccagaatctgaactggtcaacaaagcgacggcattgactgaagcagttaatcgccagctgcaccctaaaccggaagatgaatctcgcgtcagtgcctcattacgttcagcgattcaaaaatccggcatggtattgcttgatgattttggcgacattgtactgaagacagcggatttatgttctgccaaagatgactgtgtgcgactgaaaaatgcgctggtcaatctcggcaacagtaaagactgggacgcgctggtaaaacgcgccaacgccgggaagctcgatggcgtgaatgtgttattacgcccggtgagtgcggaatcgctggataacctggtggcaacctccaccgcgccgtttatcacgcatgaaacggcgcgagcggcacaatcactaaacagtccggcccccggcggattcctgattgtcagcgacgaaggcagcgattttgttgatcagccctggccttcggcatcactttacgactacccgccgcaagaacagtggaacgctttccagaaactggcacaaatgctgatgcatacgccgtttaacgccgaaggtatcgtcacaaaaatcttcactgacgccaatggtacgcagcatattggccttcatccgatcccggatcgttccggcctgtggcgctatctcagcaccacattgctgctactgacgatgctgggtagcgccatttacaatggcgtacaggcctggcgtcgttaccagcgtcatcgcactcgcatgatggagattcaggcctattatgaaagctgcctgaacccgcaactgatcaccccttcagaaagccttatcgaataacacgtttgcgcggcaggttatgctaccctgtcgcgcaaattgcttcactctggagatttccctcatgcatatcaacattgcctggcaggacgtagataccgttctgctggatatggacggcacattgctcgacctcgccttcgataactatttctggcaaaagctggtgcctgaaacatggggcgcgaaaaacggggttacgccacaggaagcgatggaatatatgcgccagcaatatcacgacgtacagcatacgctaaactggtactgtcttgattactggagtgagcaactgggtctggatatctgtgcgatgaccaccgagctgggaccgcgtgccgtactgcgtgaagataccattccgtttcttgaggcactgaaagccagcggtaagcagcgaattttgctcaccaatgcgcatccgcacaacctggcggtaaaacttgagcataccggtctggacgcacaccttgatttattactttccacccacacatttggttatccgaaagaggatcagcggttatggcatgcggtggccgaagctacgggtctgaaagctgaaagaacgctgtttattgatgacagcgaagcgattctcgatgctgccgcgcaatttggtattcgttactgcctcggcgtgactaatcctgattccgggattgccgagaaacagtatcaacgccatccgtcactgaatgactaccgccgcctgatcccctcgctaatgtgaaggagacgccatgaaagaaaaacctgctgttgaggttcgactggataaatggctatgggctgcccgtttttataaaacccgcgcgctggcccgtgaaatgattgaaggcggtaaggtgcattacaacgggcagcgcagcaagccgagcaaaatcgtcgagctgaatgccacgctcactctgcgccagggaaatgacgaacgcacggtgattgtaaaggcgattactgaacagcgtcgccccgccagcgaggcagccttgctgtatgaagagactgcggaaagtgtagagaaacgcgaaaaaatggcgatggcacgtaaacttaatgccttaaccatgccgcacccggaccgacgcccggacaaaaaagagcgccgcgacctgttacgatttaaacacggcgacagtgaataactgtcacctgcaagagagatgattatgccgcaacatgaccaattacatcgctatctgtttgaaaattttgccgttcgcggcgaactggtaaccgtttcggaaaccctgcaacagatccttgagaaccacgattatccgcagcccgttaaaaacgtgctggcagaactgctggttgcgaccagcctgttaaccgctacgctgaagtttgatggtgatatcaccgtacagctgcaaggcgacggtccgatgaatctggcggttattaacggtaacaataaccagcaaatgcgcggtgtggcgcgcgtgcagggcgaaattccagaaaatgccgacctgaaaacgctggtcggcaatggttacgtggtgatcaccattaccccgagcgaaggcgaacgctatcagggcgtggttggtctggaaggtgataccctggcggcctgcctggaagattactttatgcgttctgaacagctgccgacgcgcctgtttattcgcaccggcgacgtagacggcaaaccggctgcaggcggtatgttgttgcaggtaatgcctgcgcaaaatgcccagcaggacgactttgaccacctggcgacgctaaccgaaaccatcaaaaccgaagaactgctgaccttaccggcaaacgaagtgttgtggcgtttgtatcacgaagaagaggtgacggtttacgatccgcaggatgtggagttcaaatgcacctgctcgcgtgaacgttgcgccgatgcgctgaaaacgctgcctgatgaagaagttgatagcatcctggcggaagatggcgaaattgacatgcattgtgattactgcggtaaccactatctgttcaatgcgatggatattgctgaaatccgcaacaacgcgtctccggcagatccgcaagttcattaatgagtatgtccggcagagagggctctgccggattttacgacgtaatggcctgatgtgctgcgcttaccaggcctgtgaaataaatcgcaaattattgttggtcagatacagcgtcgtatccgttaaaagagttgtcacttacttaagtttatttccagcgtttcaccatctaccgtcagatcgcgccacgctttcggcctcgtccccagttttccatccttcgcagctgtgagtaatttttctttcgttatttcgttcggaagtaaactcatatcaagcgcgtcccattcttttctgtctgagtcaaagccatagacaatgactctgtcatcattaaaagcaaacaggatccgctccgcctgaccatcactattcagatcttgctcgaccaggacgcaggcgtctttttcaatacaggtcatcacgttatagcgatcctggattaaggccgaccagaatgtcgcatccggtttaacagaaccaggggcaattaacacattttcggctaatactttttccgatacctgttcctgaagatgttgctctccatctaacgccatcagcagatcccgcgcgcgtttcgggtctttcataaacccggcatcgcttttcagcgactcaagcgccgcacgtccatagcgaccgctctgttcgagcatgtagatagttacctggtctggcgtgtttttgccgctctgataacgcgccatatgactgttcacgctaatacgcatactgtccagcaccggcgaattaagaagcaccagtatcaccaacaccaataacgaaaccgcaaggttcactttgccctgaagaacaaggggattttgcccattacgccagacgatactgacaaaataccccagcgaccacaccagtaacaccagcaccgccagcgcgccctgcaagcggtcgacagtccagccgtactgagcgacccgcagccataacgcccaggcggcgacgaacacatacagcggagcaaccagcaaagcggttttaatcaggcaacgcaacggccccgtccagggaagtgacgctttttgcggatcgcggacaatagccattaagatcaattgcaaaaaggccagcgttaacagcaacccggcggcggagatgtggcgagaaatcgcgctcaggcccgtaaacggcagagtgatgataaacatcagggttagcaatgatactaacggcagcaaccccgtggcgattaacgtgaacaacttttgaatagagtcgattaaacgtgactgtgtgcgcgcgagaatcaccgccagtgcggtaaccagacctaatgtaagatacataaaccagtcggttgcaaaaaagagcgtattgaaaaacttgatgccaacaagtttaaacaactcaccccacagtaaaagcaccagccacgtcaggccattggcgagaaaaatcaccagtaatataagtacgttatgccatactgactggtaaaagtagctatagcggctactgccattgcggatacgaaggctttgttgtatccacggtagcaacaacattgccatcaacagcagatagcagccaaaatcccaaatcgccttttcagctctccaggggttcatgccatcagtttgccacttcagccaaccgctcatccctgtcgtggcaataaacaccagcgccagccatccccaaaggcgcttctgtttaaaagagatcacggagaagagtaaaacggatgaaaacgcaacggtcgcaggcacgccataaacaatccaactgtgattttttccggcaagccaggcgatcaacaggtagcaaaccagcccctgaagtaatccggtagcaatcatcccccagcgtgttgccggtgaaagttcaacgttatccatgttggttatccagaatcaaaaggtgggttaattatcgcatccgggcagtagtattttgcttttttcagaaaataatcaaaaaaagttagcgtggtgaatcgatactttaccgattgaatttgcatcaatttcattaaggaatgcgattccactcacaatattcccgccatataaaccaagatttaaccttttgagaacattttccacacctaaaatgctatttctgcgataatagcaaccgtttcgtgacaggattcacggagttttttgtcaaatatgaatttctccagatacgtaaatctatgagccttgtcgcggttaacacccccaaaaagactttactattcaggcaatacatattggctaaggagcagtgaaatgcgcgttaacaatggtttgaccccgcaagaactcgaggcttatggtatcagtgacgtacatgatatcgtttacaacccaagctacgacctgctgtatcaggaagagctcgatccgagcctgacaggttatgagcgcggggtgttaactaatctgggtgccgttgccgtcgataccgggatcttcaccggtcgttcaccaaaagataagtatatcgtccgtgacgataccactcgcgatactttctggtgggcagacaaaggcaaaggtaagaacgacaacaaacctctctctccggaaacctggcagcatctgaaaggcctggtgaccaggcagctttccggcaaacgtctgttcgttgtcgacgctttctgtggtgcgaacccggatactcgtctttccgtccgtttcatcaccgaagtggcctggcaggcgcattttgtcaaaaacatgtttattcgcccgagcgatgaagagctggcaggtttcaaaccagactttatcgttatgaacggcgcgaagtgcactaacccgcagtggaaagaacagggtctgaactccgaaaacttcgtggcgtttaacctgaccgagcgcatgcagctgattggcggcacctggtacggcggcgaaatgaagaaagggatgttctcgatgatgaactacctgctgccgctgaaaggtatcgcttctatgcactgctccgccaacgttggtgagaaaggcgatgttgcggtgttcttcggcctttccggcaccggtaaaaccaccctttccaccgacccgaaacgtcgcctgattggtgatgacgagcacggctgggacgatgacggcgtgtttaacttcgaaggcggctgctacgcaaaaactatcaagctgtcgaaagaagcggaacctgaaatctacaacgctatccgtcgcgatgcgctgctggaaaacgtcaccgtgcgtgaagatggcactatcgactttgatgatggttcaaaaaccgagaacacccgcgtttcttatccgatctatcacatcgataacattgttaagccggtttccaaagcgggccacgcgactaaggttatcttcctgactgctgatgctttcggcgtgttgccgccggtttctcgcctgactgccgatcaaacccagtatcacttcctctctggcttcaccgccaaactggccggtactgagcgtggcatcaccgaaccgacgccaaccttctccgcttgcttcggcgcggcgttcctgtcgctgcacccgactcagtacgcagaagtgctggtgaaacgtatgcaggcggcgggcgcgcaggcttatctggttaacactggctggaacggcactggcaaacgtatctcgattaaagatacccgcgccattatcgacgccatcctcaacggttcgctggataatgcagaaaccttcactctgccgatgtttaacctggcgatcccaaccgaactgccgggcgtagacacgaagattctcgatccgcgtaacacctacgcttctccggaacagtggcaggaaaaagccgaaaccctggcgaaactgtttatcgacaacttcgataaatacaccgacacccctgcgggtgccgcgctggtagcggctggtccgaaactgtaatgatttgaagctggagaatatctatccagtatcttatagaaagcaaaacgggaggcaccttcgcctcccgtttatttacccttcttttgtcgtgccctgcgcccgcgttaccggcactggcagccaggcgcgaatggaaagcccgccccgctcgctggtgccaagctccagcatcccgttatggttatccacgatacgctgcacaattgccagccctaatcccgtgccgctaatggtgcgcgcactgtcgccgcggacaaacggctggaacaggtgcttacgttgttccggcgcaattcccggaccgtcatcttccacctggaaccaggcgcgattcggctccgttccgctgctgactttgatccagccattgccataacgggcggcgttgaccaccatattcgccaccgcgcgtttgatcgacagcgggtgcattttcacttcaatgctgccggggtaaagcgcggtttcaatttcccgctcatagccactttcggcagcaatcacctcaccgagtactgcattaagatccgccatttccatcggcatctcctgcccggtgcgcaggtagtcgataaactgctcaatgatggcgttgcactcttcgatatctttattgatcgattctgccagatagccatcctgctcgctcatcatctcagtcgccaggcgaatacgcgtcagcggcgtgcgcaagtcgtgacttacccccgccatcagcagcgtgcggtcatccgccagttgcttaacaccagccgccatatggttaaaggcacgggtaacggaacgcacctccgaagcgccatattcacgcagcggcggcggaataatccctttaccaacctgcaaggctgcgtgttcgagatcgaccaacggtcggttctggatacgaataaacagccacgccccgcctatcgccaatagcataatcgccagcgtatagcggaacagcggagagaaatcgccctgatgaatttcggtcagcggcacgcgtacccagatattgggcgacagccaggttttcagccagacgacaggcgaacttttgttgacctcaacgcgcacttccgtcgggccgcccagttgctgtgccatctgatggcttaagaattcatagtgttgcgcccaacgcagacctgcctcttcggcagcctcgttggagtagagagagatccccagctcacggtagatctcccgacggaaagcgggaggcacaaccaactgcgtgccgtcctccagttgcagtttgtcggtcatcaacatacgcacttcgtacgcgaggactttattaaactgctggaggctcggcaaaatcgcgaagttcagcaccaccagataagtcgtcaccaggctggcgaacagcaaggtgacgatgagcaataacgtacgggcaaatgaacttcgtggcgagaagcgcaatcgcctcatgctttagagccgtccggtacaaagacgtagcccaggccccaaacggtctgaatgtaacgcggatgcgctggatcttcttctaccatgcggcgcagacgcgaaatctgcacgtcgatggagcgttccattgcggaatattcacgaccacgggcaaggttcatcagcttatcgcgggagagcggctcacgcggatggctgaccagtgccttcagtaccgcaaactcaccgctggtgagcggcatcggctcatcttcgcggaacatttcgcgcgtaccgaggttaagtttgaacttaccgaaagcaattaccgcctcttcctgtgacggtgcgcctggcagttcgttcgcctgacgacgcagcaccgcacgaatacgggccagcagttcacgcgggttaaacggttttggaatgtagtcgtcagcgccaatctccaggcctacgatacggtccacttcttcccctttcgccgtcaccataatgatcggcatcgggttgctctgactacgaagacgtcggcaaatcgacaagccatcttcaccaggtaacattaaatccagtaccataagatggaaagattcacgagtcagcaggcgatccatctgttctgcattagcgacgcttcgaacctggaagccttgttcggtgagataacgttccagcagcgcacgcaggcgcatgtcgtcatcgaccaccagaatcttgtagttctcttgcattgtttgtactcccaaaggttcgcaacaatttgtaagcgtgtattcttaaaaaagctcacgttcgtcaccagctaaatctggtatgaatttcagcctaaattgttacaaagcatattaaacagcagcttaagtatacaatttattcggcgaaacattattgattctgttgatatgatcacgttatacccaatgtgcgcattatcaaacagacaaagggaatcaacgagatgaaaacgcccctggttacccgggaagggtatgaaaaactcaaacaagagcttaattatctctggcgtgaagaacgcccggaggtcacaaaaaaggtgacctgggccgcaagtctgggcgaccgcagcgaaaatgctgactatcagtataataaaaagcgtctgcgtgaaatcgaccgtcgcgtgcgctatctcactaaatgcatggaaaatctcaaaatcgtcgattactccccnnnnnnnnnnggaaggcaaagtcttttttggcgcgtgggtggagattgaaaacgacgatggcgtgactcaccgtttccgtattgtcggctacgatgaaatttttggccgtaaagattacatctctatcgattccccgatggcccgcgcattgctgaaaaaagaagtcggcgatctggcggtggtgaatacccctgccggggaagcgagctggtatgttaatgctatcgagtacgtgaaaccgtaaggaagagtcttaacctcctgccgatggctggcatttttgccagccagtccgtataactatcccctgatttttgatccgaaaagatgaactcaaaccatgatgaatgattcgttctgccgcattattgcgggtgaaattcaggcgcgcccggaacaggttgacgctgccgttcgcctgcttgacgaagggaataccgtgccgtttatcgcacgttatcgtaaggaaatcaccggcggtctggatgacacgcagctgcgtaatctggaaacgcgtctgagctatctgcgcgagctggaagagagacgtcaggcgatcctcaagtccatttccgagcaaggcaaactcaccgatgatctggcgaaggccatcaacgccaccctaagcaaaaccgaactcgaagacctctacctgccctacaaacctaaacgccgcacccgcgggcaaatcgccattgaagcagggcttgagccgttggctgacctgctgtggagcgatccgtcacacacgccagaagtcgccgctgcacaatatgttgatgccgataaaggcgtggcagataccaaagccgcgctggatggcgcgcgctatatcctgatggaacggtttgccgaagatgccgcgctgctggcgaaagtgcgtgattatctgtggaagaacgcgcatttggtttctacggtggtgagcggtaaagaagaggaaggggcgaaattccgcgactatttcgatcatcacgaaccgttgtccacggtgccttctcaccgcgcgctggcgatgttccgtgggcgtaacgaaggcgtactccagctttcgctgaatgccgatccgcagttcgatgagccgcccaaagagagctattgcgagcaaatcatcatggatcaccttggcctgcgcctgaacaatgccccggcggatagctggcgcaaaggcgtagtgagctggacctggcgcatcaaggtgctgatgcatctggaaaccgaactgatgggtaccgtgcgcgaacgcgcggaagatgaagcaatcaacgtctttgcccgtaacctgcacgatctgctgatggcggcccctgccggactgcgtgcaacgatgggcctcgatccgggtctgcgtactggggtaaaagtggcggtggtcgatgccactggcaaactggtggcgaccgataccatttacccgcacaccggacaagccgcaaaagcagcgatgaccgttgctgccttgtgtgaaaaacataacgttgaactggtggcgatcggcaacggtacagcttcccgcgaaactgaacgtttctatctcgacgtgcagaagcagttcccgaaagtgaccgcacagaaagtgatcgtcagcgaagctggcgcgtcggtttactcagcttccgagctggcagcgcaggagttcccggatctcgacgtttcgctgcgtggtgcggtatctatcgcccgccgtttgcaggatccgctggcggagctggtgaaaatcgatccgaaatctatcggcgtaggtcagtatcagcatgacgtcagccagacgcaactggcccgcaaactggacgcagtagtagaagactgcgtaaacgccgttggcgtcgatctcaacactgcttctgttccgctgttaacccgcgtggcgggcctgacgcgcatgatggcgcaaaacatcgtggcctggcgcgatgagaacggtcagttccagaaccgtcagcaactgctgaaagtgagccgtctggggccgaaagccttcgagcagtgcgcgggcttcttgcgcattaaccatggtgataacccgctggacgcgtctaccgtccacccggaagcctatccggtggtggaacgcattctggcagcaacacagcaggcactgaaagatctgatgggtaacagcagcgaactgcgtaacctgaaagcgtctgactttactgatgaaaaattcggtgtgccgacagtaactgacatcatcaaagagctggaaaaaccgggtcgcgatccgcgtccggaatttaaaaccgctcagtttgccgatggcgtcgagacaatgaacgacctgcaaccgggtatgatcctcgaaggtgcggtgaccaacgtcaccaactttggcgcgtttgtcgatatcggcgtgcatcaggacggcctggttcacatctcttcattgtcgaacaagtttgtagaagatccgcataccgtggtgaaagcgggcgacattgtgaaggtgaaagtgctggaagtggatcttcagcgtaaacgtatcgccctgaccatgcgtctggacgagcagcctggcgaaaccaacgcccgtcgcggcggcggtaatgaacgcccgcaaaacaaccgcccggcagccaaaccgcgcggacgtgaagcgcagcctgccggtaacagcgcgatgatggacgcgctggcggcagcaatgggcaaaaaacgttaaacgccctgattgacccctaaacctgcgcgataaggtgtccacgccgcatctggcaacgaacgccttgtctgacataaaagtgccggagaatatctccggcatttttattccacagccaaactcacaatatattccggcaacatttatcacttcattaacaactgaaaccttaattaaacattagccagtcctggtaattcgctattcgaattatattttcgctgcgatataaccttgagccacatcaacattgagtcagattattattcaaaccaacattcgcacacattttaagtattgctgatagaaaccattctcattatcattgtgctgttgattatttaatctctccttcgttggcaaatcatctggtctcatgtcgctgtcaaacgccccatgaggtagttatccagttaatgagaaacaagtaggcacctatgcaatacactccagatactgcgtggaaaatcactggcttttcccatgaaatcagcccggcatatcgccaaaaactgctttctcttggcatgttacctggctcctcttttaatgtggtgcgcgtcgctccactcggcgaccccattcatatcgaaacccgtcgtgtgagcctggtattacgcaaaaaagatctggccttattagaagtggaagcggtttcctgttaatacggtgataacaacaatgaaaaaattaaccataggcttaattggtaatccaaattctggcaagacaaccttatttaaccagctcactggcgcacgtcagcgtgtaggtaactgggctggcgttaccgtcgaacgtaaagaagggcaattctccaccaccgatcatcaggtcacgctggtggacctgcccggcacctattctctgaccaccatctcatcgcagacctcgctcgatgagcaaatcgcctgtcactacattttgagtggcgacgccgacctgctgattaacgtggtggatgcgtctaaccttgagcgtaacctgtacctgacgctacaactgctggaactcggcattccctgcatcgtggcactgaacatgctcgacattgccgagaagcaaaatattcgtattgaaattgatgctctgtcggcgcgtcttggctgcccagtgatcccgctggtttcaacccnnnnnnnnnncggtattgaagcgctcaagctggcgattgatcgctataaagctaacgagaatgtggaactggtgcattacgcacagccgctactcaacgaagcagattcactggcaaaagtgatgccttccgacatcccgctgaaacaacgtcgctggctgggcctgcaaatgctggaaggcgatatctacagccgcgcctacgccggtgaagcgtcgcagcatctggatgccgccctcgcccgtctgcgtaatgagatggacgatccggcgctgcacattgccgatgcgcgttaccagtgcattgctgccatctgtgatgtggtaagcaacaccctgacggcagaacccagccgtttcaccactgcggtagataaaatcgtgctcaaccgtttcctcggtctgccgattttcctctttgtgatgtacctgatgttcctgctggctatcaacatcggcggggcgttacagccgctgtttgacgtcggctccgtggcgctatttgtgcatggtattcaatggattggctacacgctccacttcccggactggctgactatcttcctcgcccagggcctgggtggcggcattaacaccgtgctgccactggtgccgcagattggcatgatgtacctgttcctctccttccttgaggactccgggtatatggcgcgtgcggcgtttgtgatggaccgtctgatgcaggcgctgggcttgccggggaaatcctttgtgccgctgatcgtcggtttcggttgtaacgtaccgtcggtaatgggtgcacgtacgcttgatgcaccgcgtgaacgtctgatgaccatcatgatggcaccgtttatgtcctgcggcgcgcgtctggctatcttcgcagtattcgcggctgccttcttcgggcagaacggtgcgctggcggtcttctcgctgtatatgctgggtattgtgatggcggtgctgactggcctgatgctcaagtacaccatcatgcgcggtgaagcgacgccgtttgtcatggagttgccggtctatcatgtaccacacgttaaaagcctgattatccagacctggcagcgtctgaaaggcttcgttctgcgtgctggtaaagtgatcatcatcgtcagcattttcctgagcgctttcaacagcttctcgctgagcgggaaaatcgtcgataacatcaacgactcggcgctggcgtccgtcagccgggtgatcaccccggtcttcaagccaattggcgtgcatgaagataactggcaggcaacggttggcctgtttacaggtgccatggcgaaagaagtggtagtgggtacgctcaacaccctctacaccgcagaaaatattcaggacgaagagttcaatccggcagaatttaacctcggtggagaacggtacagtgcaattgatgaaacctggcagagcctgaaagacaccttcagccttagcgtactgatgaaccccattgaagccagcaaaggcgacggcgaaatgggtaccggggcgatgggcgtgatggatcagaaattcggtagcgcagcagcagcttacagctacctgattttcgtcctgctgtatgtaccatgtatctcggtgatgggagccatcgcccgtgaatcaagccgtggctggatgggcttctccatcctgtgggggctgaatatcgcttactcgctggcaacattgttctatcaggtcgccagctacagtcagcacccaacttacagcctggtgtgcattctggcggttatcctgtttaacatcgtggttatcggtctgctgcgccgcgcgcgtagccgggtggatatcgaactgctggcaacccgcaagtcggtaagcagttgctgcgcagccagcaccaccggtgattgccattaatggcttcacttattcaggtgcgcgatttgctggcgttacggggccgtatggaagcggcccagataagccagacattgaacactccacagccaatgattaacgccatgctgcaacaactggaaagtatgggcaaagccgtgcggattcaggaagaacctgacggctgcctctctggcagttgtaaaagctgcccggaaggaaaagcctgtctgcgcgagtggtgggcgctgcgttaaccttactccatcgcctgttttggaaagcccggtatgcgtctgcatccgggcttttttgcgtgcggctttccataaaaatgcaactcttgcagcacggcgtaagttcctttgaaagcatctcgcagggatgaaaactcgctaatgcacagatgtggagtggcgcgtagagtcgcggcattcaaacaacaggtgaaggaacgccatgagtaaaaagcagagttccaccccacatgatgcgctgttcaaactctttttacgccaaccggacacggctcgcgattttcttgcgttccatttaccggcccccattcacgcgctctgtgatatgaaaaccctcaagctggagtcgagcagctttattgatgacgatctgcgtgaaagctattccgatgtgctgtggtcggtgaaaacggaacaaggaccaggatacatctattgtctgattgaacatcaaagcacctcaaacaaactgatcgcatttcgcatgatgcgttacgctattgccgcaatgcaaaatcaccttgatgctggatacaaaacgttgccgatggtggtgctattgttgttttaccacggtattgaaagcccctatccctattcgctgtgttggctggattgtttcgccgatcccaaactggcaaggcagctttatgcctccgcatttccgctgattgatgtcaccgtcatgcctgatgatgaaatcatgcagcaccgacgtatggcgctgctggagttaattcaaaaacatattcgtcaacgcgacctgatggggctggtagagcaaatggcctgcttattaagtagtggatacgctaatgacagacaaatcaaagggctgtttaattacatactgcaaaccggcgacgcggtacgttttaacgattttatcgacggcgttgccgaacgttcaccgaaacacaaggagagtttaatgacaattgcggaaagattgcggcaggagggggaacaatccaaagccctgcatatagccaaaataatgcttgaatccggagtccctcttacagacatcatgcgctttaccggggtgtcagaagaagagttggctgcggcgagccagtaaatttctgtctcgccatttcaaaagttgcctacaccctctgcttcaacgccaccagcaggtgacaaaactcgaccggatgcgaaataaacggcgcatgggccgctttggcgaagatatatgattcgctgtgaggccaaagtttatccagcatcggcaccactttgcgcggcaccagaccgtcgagatagccatacaatcgcaaaaacggcatgggcacgttttgcagcggctgacggagatcgaccgttttcaggatttccagcccgccattaagcacgtcaacctccggcatcggtaacgccagaacggttttcttcaacgcccgcgcatcctggcgcgccgtttcagtccccatggtttgtaacgccaggaaccgctccactgtacgctgaaaatcatcactgagttgctgctgaaatcccgccagcacgtccggttttatccccggccactcgtcacgagcactaaaacaaggtgacgacgccacggtgaccagcgcctgaacacgctcgggatgggttaacgcaatctggcttgccaccagcccaaccaaatggctttatcaggtgcctgttgcagcacggcttcggccatatcagcaagtgacagcgcaccaaatccccggctacgcccgaagccgggcaggtcaacaaggtgcagcgtaaaatgcgagctaagttcctcgtcaatgcaacgccacacttcggcattcagtccccatccgtgcagcagcacaagatgaacattcccctgacctttggtctgccaccagatgttattcatccgctattgttctcttttgacttacaaggatgaacatatgctaacagtaccgggattatgctggctatgccgaatgccactggcgttaggtcattgggggatttgttcggtctgctcacgcgctgcccgtacagataaaacgttatgtccacaatgtggattacccgccacacactcacatcttccctgcggtcgctgcctgcaaaaaccaccgccctggcaaagactggtcacggttgccgactatgcgccgccgttaagtccgcttatccaccagcttaaattttcccggcgcagtgaaatcgccagcgccctgtcacgtctgttactattggaagtcttacacgctcgtcgcaccaccgggttgcaattgccggatcgcatcatcagcgttccgttatggcagcggcgtcactggcgtcggggatttaatcagagcgatttgctgtgtcagccgttatcacgctggttgcactgccaatgggatagcgaagccgtcacacgtacacgggccactgcgacccagcattttctcagtgcccggctgcgcaagcgcaacctgaaaaatgcctttcgtcttgaattgcccgtgcaaggtcgccatatggtgattgtggatgatgtcgttaccaccggaagtaccgtcgcagagattgcgcagttgcttttacgcaatggtgcggcgactgtccaggtctggtgcctttgtcgaaccttgtagagcctcgatgatgggcgtattataaccaactaaaatagtcaactattaggccattactatgatccgtatttccgatgctgcacaagcgcactttgccaaactgctggcaaatcaggaagaagggacacaaatccgcgtatttgtgattaaccctggcacgcctaacgctgaatgtggtgtttcttattgtccgccggatgccgtggaagccaccgacactgccctgaaatttgacctgctgaccgcgtatgttgatgagttaagcgcaccatacctggaagatgcagagatcgactttgttaccgaccagttgggttctcagttaacgctgaaagccccgaacgccaaaatgcgtaaagtggcagacgatgcaccgctgatggagcgcgtggagtatatgctgcagtcgcagatcaacccacagcttgctggnnnnnnnnnncgtttcgctgatggaaatcacagaagacggttacgccattctgcaatttggcggcggctgtaacggttgttccatggtcgatgtgacgctgaaagaagggatcgagaagcagctgctgaacgaattcccggagctgaaaggtgtgcgcgatctcaccgaacaccagcgcggcgaacactcctactactaagttatcccctcttttgtagattgcccgatgcgacgctaaagcgtcatttcgggcctacgttgaacatgtgccagacgttggcacagcattgctttggcaaatccctcccttcgtttccccgcgataatatgaccaacctctcataatttaaatttaccccgctctggtgattctcaaacgccagatgttacccgtatcattcacatgggtaccaaacatactcctgacatctgactacaataattagttttagtgggtatcagtcgtggtgccgcaatatctctgttcccgattgggataattagagtttgtcgtcagaaaattgacgttacccataacaaatgaaaggccaggtaaatcatgccattagtcattgttgctatcggtgtaatcttgttgttgctcctgatgatccgcttcaaaatgaacggcttcatcgctctcgtcctcgtggcgcttgctgttggattaatgcaaggaatgccgctggataaagttattggctccatcaaagccggtgtcggcgggacgctcggtagccttgccctgatcatgggttttggcgcaatgctgggcaaaatgctggcagactgcggtggcgcacaacgtatcgccaccacgctgattgccaaatttggtaaaaaacacatccagtgggcggtggtactgaccggttttaccgttggttttgccctgttctatgaagtgggctttgtgctgatgctgccgctggtgtttaccatcgcggcttctgcgaatattccactgttgtatgttggtgtaccaatggcagctgcactgtctgtgacccacggcttcctgccaccgcatccgggtccgactgcgattgccaccattttcaatgccgatatgggtaaaaccctgctgtacggtactattctggcaatcccgaccgtgattctcgccggtccggtttacgctcgcgtgttgaaaggtatcgataagccaattccggaaggtctctacagcgcgaaaaccttcagcgaagaagagatgccgagctttggcgtcagcgtctggacttctctggtgccggttgtgctgatggcgatgcgtgcgattgccgaaatgatcctgccgaaaggtcacgctttcctgccggtagcggagttcctcggtgacccggtaatggcaacgctgattgccgtgctgattgcgatgttcacctttggtctgaaccgtggtcgttcaatggatcagattaacgacacgctggtttcttccatcaaaatcattgcgatgatgctgttgatcatcggtggtggcggtgcgttcaagcaggtgctggtagacagcggcgtggacaaatacattgcttccatgatgcacgaaaccaacatttctccgctgctgatggcctggtcgattgctgccgtactgcgtatcgcgctgggttccgcaaccgttgcggcaatcactgcgggtggtatcgcggcaccgctgattgcaacgacgggtgttagcccagagctgatggttattgcggtgggttccggtagtgtgattttctctcatgtgaacgatccgggcttctggctgttcaaagagtactttaacctgactatcggcgagaccatcaaatcctggtcgatgctggaaaccattatctcggtgtgcggtctggtaggctgtctgctgctgaatatggtgatttgataacactgactgccggatgcatcgcatccggcatcaaccgcactctacttcttcttcgctgcagctctgcgccgtctgtccaaatccttcagcaacttgttcacgccatcatcggcaaacatcgtctcaagcgttgcggaaagcttgcgtcgccagtttttatactggtaactggtgccaggaatattcaccggttcggccatatccagccagtcttccggctgtagtcctaacagagcactgttactgtcggcaatgtagcgctgcaaaccacggttcagcgtcggcgtcatcgacatcaacgatgccttatgcccggcacgttttggcagacaaccatatttatgcagtgcatccagcagcccttgcttcgccagttcgcgatcctgatacagaccgcgcagtaccacttcatccggatacagccccagggttttgcccagcgttagatccccgctctcccagtaaccgcgtagcgtaggcaggtcatgtgtcgccgcaaccgccatcgactgctccggatacgctttcggtgcacggaacgtcttctcgtggtcgttttcgaaatagagcactttgtaggagtacacaccgctgctgcgcagcttaccgacaatctctaccggtacggt

SEQ ID NO: 232 - DNA, 22286 bp, Escherichia coli
  source 1..22286: mol_type = genomic DNA
ggcgtcaatgaagttacggctcatcaggtcacccagaacgtcctggcgtacagacgcgccataacgctgagcaacgatattcattggcactttgcctttgcggaagccgtcaatacgtacttttttcgcaacgttgaccagctcgcttttaacagcggtctcgatgctgtcagcagcgatagtaatcgttacacggcggccaaggccttgagtggtttcaactgaaacttgcatcttgttacctcaaaaaatcacagtgctcggtcaactcttaccccgcaagcacaggttgttggcttcgcggaaccgggatgttcttataatcaatcacattccctgttaccagaatcatcccgaaagcattcaaataggacgcggcattatagcggcatcacttttatgagtcgagaacggttattgcgcgctgtcgcgtattttttcacaattcccgggcaattttcgtctgaatgctgggcaaaaagcgcaaaatccagacaaaacaaaacggcccgcaggccgtttttcataaaatctttagcaacatactggaaaagcgccgacagttgcaaatgcgtttttacgcgatgcttcctgctccacgacagggaggagaggcaaagacggtgtcctgcaacccttcccactccttaatagtgtaagtatgcagagccagcgcatgaacggtagtagagagttcctccgctaaagtactgtaaatcattcgatgacgattcagaaaacgttcacccgtaaaacgatcgctgaccagcacaactttaaaatggctttcagagccggctgggacattgtgacgatagctttcatccactacttcgaggaatacgggttggaacgccgcccttaatttttcttctatccgctcacgtatcatcatgaaatatctcctccgacaacgctgagatgtcatccatccctttaaatactagccgcttttaccgtttccattgcagcttaacaacaaatatttaggtttcgtcctggtttttccgtcaagcgtatgaagtttactgatttaaagattgaaacacaggcctcgcatcagtgtttcttttaccaggggcgattatttcgtcaacatgatgaatttacatgccttacccacttcccctcgccgttggcaatgttatgatggcgggaatttttaccaaacacgcttaagagtctctgagagcccgaacatgttcaaaaaaatcctcttcccgttagttgctctgtttatgcttgcaggatgcgcaaaaccgccaacaactattgaagtttccccgacgattacactgccacagcaggatccaagcctgatgggcgtcaccgtaagcattaatggtgccgatcagcgtaccgatcaggcgctggcaaaagtcacccgcgataatcaaatcgttaccctgaccgcctcccgcgatctgcgtttcctgctgcaagaagtgctggaaaaacagatgaccgcgcgtggttacatggttggtccgaatggcccggttaatctgcaaatcatcgttagccaactgtatgctgacgtgtcccagggcaacgtgcgctacaacatcgcgaccaaagcggatatcgccatcatcgctaccgcgcagaatggcaacaaaatgaccaaaaactatcgtgccagctacaacgttgaaggtgcgttccaggcctccaacaaaaatatcgccgatgcggttaacagtgtgctgaccgataccatcgctgatatgtctcaggacaccagcatccacgaattcatcaagcagaacgcgcgttaatttctaccctctggcccggtgcaagccgggcctgtagacgcccatgtccagtcaatatttacgtatttttcaacagccgcgttcagccatattgctgatcctgggttttgcttccgggctaccgctcgccctgacatccggtaccttacaggcctggatgacggtcgagaatattgatctcaaaaccattggtttcttctctctggtaggccaggcttacgtttttaaattcctctggtcaccgctgatggaccgctacacgcccccattttttgggcggcggcgcggttggctgctcgccacgcaaatcctgttattagtcgccattgcggcgatgggttttctcgaaccaggcacccaactccgctggatggcggcgctggcggtggtgatcgctttttgctcggcctctcaggatattgtcttcgatgcgtggaaaaccgatgtgctcccggcagaagnnnnnnnnnngcgtggtgcgggcgcggcaatcagcgtgctgggttaccgtttagggatgctggtttccggcggcctagccctgtggctggcagataaatggctgggctggaagggcatgtactggttgatggcggcgctgttgatcccctgtattatcgcgacgttgcttgcaccagaaccaaccgacaccattcctgtgcccaaaacgctggaacaagcggttgttgcacctctgcgagatttctttggtcgcaataatgcctggcttattttgcttcttatcgtgctgtataagctgggcgacgcattcgccatgagcctgacaaccacgtttttgattcgcggcgtcgggtttgatgcgggtgaagtaggcgtggtaaacaaaacgcttggcttactggcgaccattgtgggcgcattgtacggtgggattttgatgcagcgcctgtcgctgttccgggcgctgctgattttcggcattttacaaggtgcgtctaacgctggttactggctgctgtcgattactgataagcatctctacagcatgggcgcagccgtctttttcgaaaacctctgtggcgggatgggcacatcagcctttgtcgcgctgttaatgacgctgtgtaataagtcattttccgctactcaatttgccctgctctcagcgctttccgctgtaggacgagtttatgtcggccccgtggcgggttggtttgttgaagcacacggctggtcgacattctatctattctccgtcgccgctgccgtaccggggcttattttgctgctggtttgccgccagacgcttgaatatacacgagtaaatgacaactttatctcccgtaccgaatatccggcaggttatgcctttgccatgtggacactggcggcgggcgtcagcctgttggccgtgtggttactgctgttgacgatggacgcgctggatttgacgcacttctctttcctgcctgctctgctggaagtcggggttttagtcgccctttctggcgtcgtgcttggtggtttgctggattatctggcgctacgaaaaacgcatctgacgtaatctgtaaatattatttagctgtagtaatcactcgccgtaattattacggctaaataaacatcagtatcgcttaataatatttgttcttttgtgcggcttagcgtttggaaattattgacgccatttataaattctatttttcttacacgattcagctaatgagtctttattttctcatcacccagttgtcactccaatgataattatttgttaaataattgttttatttcgcattggttataccaattgcccgcccagactccttctgcactccccttttgttataacgcccttttgcaacagcttcttaaaatcaacctgatatgttttgcaacatatgtgacctgacagccaaatccaagtaacaggaatttaatcatgtttacagtaatgtaaccttcccgtaaaatgcccacacactttaaacgccaccagatcccgtggaattgaggtcgttaaatgagactcaggaaatacaataaaagtttgggatggttgtcattatttgcaggcactgtattgctcagtggctgtaattctgcgctgttagatcccaaaggacagattggtctggagcaacgttcactgatactgacggcatttggcctgatgttgattgtcgttattcccgcaatcttgatggctgttggtttcgcctggaagtaccgtgcgagcaataaagatgctaagtacagcccgaactggtcacactccaataaagtggaagctgtggtctggacggtacctatcttaatcatcatcttccttgcggtactgacctggaaaaccactcacgctcttgagcctagcaagccgctggcacacgacgagaagcccattaccatcgaagtggtttccatggactggaaatggttcttcatctacccggaacagggcattgctaccgtgaatgaaatcgctttcccggcgaacactccggtgtacttcaaagtgacctccaactccgtgatgaactccttcttcattccgcgtctgggtagccagatttatgccatggccggtatgcagactcgcctgcatctgatcgccaacgaacccggtacttatgacggtatctccgccagctacagcggcccgggcttctcaggcatgaagttcaaagctattgcaacaccggatcgcgccgcattcgaccaatgggtcgcaaaagcgaaacagtcgccgaactccatgtctgacatggcagcgttcgaaaaactggccgcgcctagcgaatacaaccaggtggaatatttctccaacgtgaaaccagacttgtttgccgatgtgattaacaagtttatggctcacggtaagagcatggacatgacccagccagaaggtgagcacagcgcacacgaaggtatggaaggcatggacatgagccacgcggaatccgcccattaaaggggttgaggaagaataaagatgttcggaaaattatcacttgatgcagtcccgttccatgaacctatcgtcatggttacgatcgctggcattattttgggaggtctggcgctcgttggcctgatcacttacttcggtaagtggacctacctgtggaaagagtggctgacctccgtcgaccataaacgcctcggtatcatgtatatcatcgtggcgattgtgatgttgctgcgtggttttgctgacgccattatgatgcgtagccagcaggctcttgcctcggcgggcgaagcgggcttcctgccacctcaccactacgatcagatctttaccgcgcacggcgtgattatgatcttcttcgtggcgatgcctttcgttatcggtctgatgaacctggtggttccgctgcagattggcgcgcgtgacgttgcgttcccgttcctcaacaacttaagcttctggtttaccgttgttggtgtgattctggttaacgtttctctcggcgtgggcgaatttgcgcagaccggctggctggcctatccaccgctatcgggaatagagtacagtccgggagtcggtgtcgattactggatatggagtctccagctatccggtataggtacgacgcttaccggtatcaacttcttcgttaccattctgaagatgcgcgcaccgggcatgaccatgttcaagatgccagtatttacctgggcatcactgtgcgcgaacgtactgattattgcttccttcccaattctgacggttaccgtcgcgttgttgaccctggatcgctatctgggcacccatttctttaccaacgatatgggtggcaacatgatgatgtatatcaacctgatttgggcctggggccacccggaagtttacatcctgatcctgcctgttttcggtgtgttctccgaaattgcggcaaccttctcgcgtaaacgtctgtttggttatacctcgctggtatgggcaaccgtctgtatcaccgtgctgtcgttcatcgtctggctgcaccacttctttacgatgggtgcgggcgcgaacgtaaacgccttctttggtatcaccaccatgattatcgccatcccgaccggggtgaagatcttcaactggctgttcaccatgtatcagggccgcatcgtgttccattctgcgatgctgtggactatcggttttatcgtcaccttctcggtgggcggtatgactggcgtgctgctggcagtaccgggcgcggacttcgttctgcataacagtctgttcctgattgcgcacttccataacgtgatcatcggcggcgtggtcttcggctgcttcgcagggatgacctactggtggcctaaagcgttcggtttcaaactgaacgaaacctggggtaaacgcgcgttctggttctggatcatcggcttcttcgttgcctttatgccactgtatgcgctgggcttcatgggtatgacccgccgtttgagccagcagattgacccgcagttccacaccatgctgatgattgcagccagcggtgcagtactgattgcgctgggtattctctgcctcgttattcagatgtacgtttctattcgtgaccgcgaccagaaccgtgacctgactggcgacccgtggggtggccgtacgctggagtgggcaacctcttccccgcctccgttctataactttgccgttgtgccgcacgttcacgagcgtgatgcattctgggaaatgaaagagaaaggcgaagcgtacaaaaagcctgaccactatgaagaaattcatatgccgaaaaacagcggtgcaggtatcgtcattgcagctttctccaccatcttcggtttcgccatgatctggcatatctggtggctggcgattgttggcttcgcaggcatgatcatcacctggatcgtgaaaagcttcgacgaggacgtggattactacgtgccggtggcagaaatcgaaaaactggaaaaccagcatttcgatgagattactaaggcagggctgaaaaatggcaactgatactttgacgcacgcgactgcccacgcgcacgaacacgggcaccacgatgcaggcggaaccaaaatcttcggattttggatctacctgatgagcgactgcattctgttctctatcttgtttgctacctatgccgttctggtgaacggcaccgcaggcggcccgacaggtaaggacattttcgaactgccgttcgttctggttgaaactttcttgctgttgttcagctccatcacctacggcatggcggctatcgccatgtacaaaaacaacaaaagccaggttatctcctggctggcgttgacctggttgtttggcgccggatttatcgggatggaaatctacgaattccatcacctgattgttaacggcatgggtccggatcgcagcggcttcctgtcagcgttctttgcgctggtcggcacgcacggtctgcacgtcacttccggtcttatctggatggcggtgctgatggtacaaatcgctcgtcgcggcctgaccagcactaaccgtacccgcatcatgtgcctgagcctgttctggcacttcctggatgtggtttggatctgtgtgttcactgttgtttatctgatgggggcgatgtaatgagtcattctaccgatcacagcggcgcgtcccatggcagcgtaaaaacctacatgacaggctttatcctgtcgatcattctgacggtgattccgttctggatggtgatgacaggggctgcctctccggccgtaattctgggaacaatcctagcaatggcagtggtacaggttctggtgcatctggtgtgcttcctgcacatgaataccaaatcagatgaaggctggaacatgacggcgtttgtcttcaccgtgctaatcatcgctatcctggttgtaggctccatctggattatgtggaacctcaactacaacatgatgatgcactaagagcggcggttatgatgtttaagcaatacctgcaagtaacgaaaccaggcatcatctttggcaacctgatctcggtgattgggggattnnnnnnnnnnctgctggcctcaaagggcagcattgattatcccctgtttatctacacgctggttggggtgtcactggttgtggcgtcgggttgtgtgtttaacaactacatcgacagggatatcgacagaaagatggaaaggacgaagaatcgggtactggttaaaggcctgatctctcctgctgtctcgctggtgtacgccaccttgctaggctttgctggctttatgctgctgtggtttggcgcgaatccgctggcctgctggctgggggtgatgggctttgtcgtttatgtcggcgtttatagcctgtacatgaaacgccactcagtctacggcacattgattggttcgctctccggcgctgcgccgccggtgattggctactgtgcagtaaccggcgagttcgatagcggcgcagcgatcctgctggctatcttcagcctgtggcagatgcctcactcctatgccatcgccattttccgctttaaggattatcaggcggcgaacattccggtattgccagtggtaaaaggcatttcggtggcgaagaatcacatcacgctgtatatcatcgcctttgccgttgccacgctgatgctctctcttggcggttacgctggatataaatatctggtggtcgccgcggcggttagcgtctggtggttaggtatggctctgcgcggttataaagttgctgatgacagaatctgggcgcgcaagctgttcggcttctctatcatcgccatcactgccctctcggtgatgatgtccgttgattttatggtaccggactcgcatacgctgctggctgctgtgtggtaacaaaacctctcagttaaaaaggtgctacggcaccttttttcttagcattagaaacatatccctctcgaaatatttactaaaaaatccgcatgtttaccccattcgtttgccgctttacactagtcgcgaatttaaaacagaggtggtaatgaacgattataaaatgacgccaggtgagcggcgcgcgacctggggtttaggaaccgttttctcgttgcgcatgctgggcatgtttatggttctgccggttctgaccacgtatggcatggctctgcaaggtgccagcgaagcattaatcggtattgccattggtatttatggtctgactcaggccgtttttcagattccgtttggcctgctttccgaccgcattggtcgcaaaccattaattgtcggtgggctggcggtgtttgccgccggtagcgttatcgctgcgctttctgactccatctggggaattattctgggccgggcgctacaaggctccggtgcgattgccgctgccgttatggcgctgctttccgatctcacgcgcgaacaaaaccgtaccaaagcaatggcgtttatcggcgtgagctttggcattacctttgccattgcgatggtgcttggcccgatcatcactcacaaacttgggctgcacgcgctgttctggatgatcgctattctggcaacaaccggcattgcgttgaccatttgggttgtgcccaacagtagcactcacgtacttaatcgtgagtccggaatggtgaaaggcagtttcagtaaagtgctggcggaaccgcggctgctaaaactcaactttggcattatgtgtctgcacatgcttctgatgtctacgtttgttgccctgcccggacagctagctgatgcggggttcccggcggctgaacactggaaggtctatctggcgacgatgttaatcgcctttggctcggtcgtgcctttcattatctacgctgaagttaagcgcaaaatgaagcaagtctttgtcttctgcgtcgggttgatcgtggttgcggaaattgtgttgtggaacgcacaaacgcagttctggcaactggtggtcggcgtgcagcttttctttgtggcgtttaatttgatggaagcccttctgccctcacttatcagtaaagagtcgccagcaggttacaaaggtacggcgatgggtgtctactccaccagccagtttcttggcgtggcgattggcggttcgctgggcggctggattgacggcatgtttgacggtcagggggtatttctcgctggcgcaatgctggccgcagtgtggctggcagtcgccagtaccatgaaagaaccgccgtatgtcagcagtttgcgcattgaaatcccggcggacattgccgcaaacgaagcgttaaaagtgcgtttgctggaaactgaaggcgtcaatgaagtgttgattgcagaagaagagcattcagcttatgtgaaaatcgacagcaaagtgacaaatcgctttgaggttgaacaggcaattcgtcaggcataaaaaacgcggcgaattgcctgctgcgctacgcttaccaggcctacaaagttcttgagttacaaaccgttgtaggccgaatcaggcgttcatgccgcatctgacatgaacaaaacgcacattgtcgcgattaatcgcggaagtttttgaactggaacggctggccgagatcgccaccacgtaccatcgccatgacagcctgcaaatcatcacgagatttgccagtcacacggatctcatcgccctgaatttgcgcctgcactttcagtttgctgtctttaatcatcttgacgattttcttctgggtcgcgctctcaatgccctgtttcagtttcgcttccacaaaccaggttttaccgctatgaacgatattttccggtacatccagtgaactgccttcaatgccgcgcttcagcagcttggcacgcagaatatccagcaactgattgacctggaagtcggactcgctcaacactttgatggttttgctggcgtcgttcagctcaaatgaggcttcaacgttacggaagtcaaaacgggactccacttcgcgactcgcgttatcgaccgcgttacgtgcttcctgaagatcaacttcagagacaatatcgaaagatggcatcttttcctctcccttcatttttgatgcgaagcataatacctgcaaagttaaataaccaacagtcctgcaccaggacgtatcccttaattgtgcatagtcgcaacagcatgcacaattaagggatagccttattgaacacccggagtggttgcgggtgaggaggaacaatgaaaattaccgtattgggatgcggtgccttagggcaattatggcttacagcactttgtaaacagggtcacgaagttcagggctggctgcgcgtaccgcaaccttattgtagtgtgaatctggttgagacagatggttcgatatttaacgaatcgctgaccgccaacgatcccgattttctcgccaccagcgatctgctcctggtgacgctgaaagcatggcaggtttccgatgccgtcaaaagcctcgcatccacactgcctgtagctacgccaatactgttaattcacaacggcatgggcaccatcgaagaattgcaaaacattcagcagccattactgatgggcaccaccacccatgccgcccgccgcgacggcaatgtcattattcatgtggcaaacggaatcacgcatatcggtccggcacggcaacaggatggcgattacagttatctggcggatattttgcaaaccgtgttgcctgacgttgcctggcataacaatattcgcgccgagctgtggcgcaagctggccgtcaactgtgtgattaatccactgaccgccatctggaattgcccgaatggtgaattacgtcatcatccgcaagaaattatgcagatatgcgaagaagtcgcggcagtgatcgagcgcgaagggcatcatacttcagcagaagatttgcgtgattacgtgatgcaggtgattgatgccacagcggaaaatatctcgtcgatgttgcaggatatccgcgcgctgcgccacaccgaaatcgactatatcaatggttttctcttacgccgcgcccgcgcgcatgggattgccgtaccggaaaacacccgcctgtttgaaatggtaaaaagaaaggagagtgaatatgagcgcatcggcactggtttgcctcgcccctggtagtgaagagactgaagccgtcaccactatcgatctgctggttcgcggcggtatcaaagtcaccactgccagcgtcgccagcgatggcaacctggccattacctgctcgcgcggcgtgaagctgctggcggatgcgccgctggtcgaggtggctgatggcgaatatgacgtgatcgtactgcctggtggcattaaaggcgcagagtgttttcgcgatagtaccctgctggttgaaaccgttaaacagttccaccgttccgggcgtatcgtcgcggctatttgcgccgcgccagccaccgtgctggtgccgcacgatatcttcccgattggtaatatgaccggcttcccgacgctgaaagacaaaattcccgttgaacaatggcaggacaagcgcgtcgtctgggatgcacgggtaaaattgctgaccagccaggggccggggacagctatcgactttggtctgaaaattatcgacctgctggttgggcgcgagaaagcccatgaagtggcatcacaactggtgatggcggcagggatttataattattacgagtagtgtcggatgcggtaagcgtcgcatctgaccagatgcgacgttacaaccacaaattacgggcgatataccttcacattgttaaagccctgctcgcgcagatagagcgcctgcagacggctcatcaccccgcgctcacaccacagtagccaggttctgttctggtcgagatcgccaaacttggtgctcagtttatagaacggcagagaaactacatcaatcccttcgactttcagtggcttatcttcctgttcatcgatagaacggatatcgaggatcacgtcgttcgggccgaagccattgacggtttccacttccaccacttcctgctcggtctgctgggcgatttcgcggatatcaacgttattcgcttcttcaaccactttatcgagaatgctgaagtcgaatttctcttcttccgcttcaatcttcgacttaaccgctttcaccgtcgggcttttggagataacaccgcaatattccggcatcgtgcgagcaaagtcttcggtgccaatctggcgagccaggttgatgatgtgctctttgtcgtaagaaatcagcggacgcaggatcagcgtatcggagacgttatcaatcaggcgcaggttggtcagcgtctgactggacacctggccgagcgcttcgccggtgaccagcgcctgtacgccgtaacgttcagccactttagacgcggcacgcaccatcatacgtttgaggataacgcccatctgaccgtcgtcgattttctcgagaatttccccgacgaccggttcgaaattaatagcgacaaaacgcacgcggtgggagctgccaaaacggttccacagataatgcgccacctgacgcacgccaatttcatgcgccgcgccgccaaggttaaagaaacagtaatgcacgcggcagccgcgacgcatcaacatataactggaaacaccggagtcgaaaccaccggaaatgagcgacagcacatcttcctgggtgccgatcgggaaaccgccaataccttcgtagcggcctttaatcagcaggagacgatcgtcttccacttccagatggacagtcacttccggattggtcagcttcacgcgcgcggactcaatatgctgatttaaaccgccgccgacgtaacgttccacatcaatcgagctaaaatcatgtttgccacggcgcttcacgcgtacgcagaaggttttgccttccagctgatcgcgatactgaaccaacgctttctcaaaaatatcgtgcatgtcggtaaacggcacgtcttcgacttcgagaatatggtggatacccggaatacgggtcagggcgtcgcgaatagccagacgctggttttcatcttttgcgcgaacttcgatgttatcccagtggcggacgacagcgagcgtctcatcatagtgctttaaaacgttacgaatgttcccggtaaggatttttataaagcgcaagcgcacagattggcttttgatggtgatttccgggaacaatttaatgataaacttcatggcggcaatggttcgttggcaagccttaagcgacttgtatagggaaaaatacagcagcccacacctgcggctgcatccaggcgcggaagtataccactaacatcgctttgctgcgcacatcaccttaccattgcgcgttatttgctatttgccctgagtccgttaccatgacggggcgaaaaatattgagagtcagacattcattatgccgaagaaaaatgaggctcccgccagctttgaaaaggcgnnnnnnnnnnaacagattgtaacccgtctggaaagtggcgacctgccgctggaagaggcgctgaacgagttcgaacgcggcgtgcagctggcacgtcaggggcaggccaaattacaacaagccgaacagcgcgtacaaattctgctgtctgacaatgaagacgcctctctaaccccttttacaccggacaatgagtaatggactttccgcagcaactcgaagcctgcgttaagcaggccaaccaggcgctgagccgttttatcgccccactgccctttcagaacactcccgtggtcgaaaccatgcagtatggcgcattattaggtggtaagcgtctgcgacccttcctggtttatgccaccggtcatatgtttggcgttagcacaaacacgctggacgcacccgctgccgccgtagagtgtatccacgcttactcattaattcatgatgatttaccggcgatggatgatgacgatctgcgtcgcggtttgccgacctgccatgtgaagtttggcgaagcaaacgcgattctcgctggcgacgctttacaaacgctggcgttctcgattctaagcgatgccaatatgccggaagtgtcggatcgcgacagaatttcgatgatttctgaactggcgagcgccagcggtattgccggaatgtgcggtggtcaggcattagatttagacgcggaaggcaaacacgtacctctggacgcgcttgagcgtattcatcgtcataaaaccggcgcattgattcgcgccgccgttcgccttggtgcattaagcgccggagataaagggcgtcgtgctctgccagtactcgacaagtacgcagagagcatcggccttgccttccaggttcaggatgacatcctggatgtggtaggagatactgcaacgttgggaaaacgccagggtgccgaccagcaacttggtaaaagtacctaccctgcacttctgggtcttgagcaagcccggaagaaagcccgggatctgatcgacgatgcccgccagtcgctgaaacaactggctgaacaatcactcgatacctcggcactggaagcgctagcggactacatcatccagcgtaataaataaacaataagtattaataggcccctgatgagttttgatattgccaaatacccgaccctggcactggtcgactccacccaggagttacgactgttgccgaaagagagtttaccgaaactctgcgacgaactgcgccgctatttactcgacagcgtgagccgttccagcgggcacttcgcctccgggctgggcacggtcgaactgaccgtggcgctgcactatgtctacaacaccccgtttgaccaattgatttgggatgtggggcatcaggcttatccgcataaaattttgaccggacgccgcgacaaaatcggcaccatccgtcagaaaggcggcctgcacccgttcccgtggcgcggcgaaagcgaatatgacgtattaagcgtcgggcattcatcaacctccatcagtgccggaattggtattgcggttgctgccgagaaagaaggcaaaaatcgccgcaccgtctgtgtcattggcgatggcgcgattaccgctggcatggcgtttgaagcgatgaatcacgcgggcgatatccgtcctgatatgctggtggtcctcaacgacaatgaaatgtcgatttccgaaaatgtcggcgcgctcaataaccatctggcacagctgctttccggtaagctttactcttcgctgcgcgaaggcgggaaaaaagttttctctggcgttccgccaattaaagagctgctcaaacgtaccgaagaacatattaaaggcatggtagtgcctggcacgttgtttgaagagctgggctttaactacatcggcccggttgacggtcacgatgtgctggggcttatcaccacgctgaagaacatgcgcgacctgaaaggcccgcagttcctgcatatcatgaccaaaaaaggtcgtggttatgaaccggcagaaaaagaccccatcactttccacgccgtgcctaaatttgatccctccagcggttgtttgccgaaaagtagcggcggtttgccgagctattcaaaaatctttggcgactggttgtgcgaaacggcagcgaaagacaacaagctgatggcgattactccggcgatgcgtgaaggttccggcatggtcgagttttcacgtaaattcccggatcgttacttcgacgtggcaatcgccgagcaacacgcggtgacctttgccgccggtctggcgattggtgggtacaaacccattgtcgcgatttactccactttcctgcaacgcgcctatgatcaggtgctgcatgacgtggcgattcaaaagctcccggtcctgttcgccatcgaccgcgcgggcattgttggtgctgacggtcaaacccatcagggcgcttttgacctctcttacctgcgctgtataccggaaatggtcattatgaccccgagcgatgaaaacgaatgtcgccagatgctctataccggctatcactataacgacggcccgtccgcggtgcgctacccgcgcggtaacgcggttggcgtggaactgacgccgctggaaaaactgccaattggcaaaggcattgtgaagcgtcgtggtgagaaactggcgatccttaactttggtacgctgatgccagaagcggcgaaagtcgccgaatcgctgaacgccacgctggtcgatatgcgttttgtgaaaccgcttgatgaagcgttaattctggaaatggccgccagccatgaagcgctggtcaccgtagaagaaaacgccattatgggcggcgcaggtagcggagtgaacgaagtgctgatggcccatcgtaaaccagtacccgtgctgaacattggtctgccggacttctttattccgcaaggaactcaggaagaaatgcgcgccgaactcggcctcgatgccgccggtatggaagccaaaatcaaggcctggctggcataatccctactccactcctgctatgcttaacaaattattcatagactctaaataattcgagttgcaggaaggcggcaaacgagtgaagccccaggagcttacataagtaagtgactggggtgaacgaatgcagccgcagcacatgcaacttgaagtatgacgagtatggcaggagtggcagcatgcaatacaaccccttaggaaaaaccgaccttcgcgtttcccgactttgcctcggctgtatgacctttggcgagccagatcgtggtaatcacgcatggacactgccggaagagagtagccgtcccatcattaaacgcgcgctggaaggcggcataaatttctttgataccgccaatagcttttccgatggcagcagcgaagagatcgttggtcgcgcactgcgggatttcgcccgtcgtgaagacgtggtcgttgcgacgaaagtgttccatcgcgttggtgatttaccggaaggattatcccgtgcacaaattttgcgctctatcgacgacagcctgcgccgtctcggcatggattatgtcgatatcctgcaaattcatcgctgggattacaacacgccgatcgaagagacgctggaagccctgaacgacgtggtaaaagccgggaaagcgcgttatatcggcgcgtcatccatgcacgcttcgcagtttgctcaggccctgaagctacaaaaacagcacggctgggcgcagtttatcagtatgcaggatcactacaatctgatttatcgcgaagaagagcgcgagatgctgcctctgtgttatcaggagggcgtggcggtgattccgtggagcccgctggcgcgggggcgactgacgcgtccgtggggagaaactaccgcacgactggtgtctgatgaggtggggagaaatctctataaagaaagcgatgaaaatgacgcgcagatcgcagagcggttaacgggcgtcagtgaagaactcggtgcaacacgagcacaagttgcgctggcctggttgttgagtaaaccgggcattgccgcaccgattatcggtacatcgcgggaagaacagcttgatgagctgctgaacgcggtggatatcactttgaagccagaacagattgccgaactggaaacgccgtataaaccgcatgcggtcgtaggatttaaataagagtccaggcctgatgagacgtgacaagcgtcacatcaggcatcggtgcacaactacgacagaatacccagcggccagtgatgaccgataaagtacaggatgcctgcggaaatcaccccggcgacaatatcgtcgatcatgatccccatgccgccatgtacattgcgatcaaaccagcggatcggccacggcttccacatatccagaatacggaaaatcacaaacccggcggcaacccactgccagtcattgnnnnnnnnnntgagcgtgatccacataccaataaattcgtcccagacaatgctgccgtgatcgtgcacgcccatatctttcgccgtttgatgacaaagatagacgccgatacagatccccaacatcaccaccagcgagtagagctgccagggtaaaaaggtcatcagataccagaacggaatcgctgccagcgatcccatcgtgccaggaacgattgggcttaatccacttccgaatccgacagcaagcagatgccacggattactcatcttcaggcgacttttcgcgacatctttatggcgtggcaaaatggtcatatcctttccagtcaaacgtgacaggttcgccgtcacgaataaaacaaagcccttcgatatcggcggtcatttgcccgatacaggtaaacggtacgcccaggtgtccgagagccacatccagcgcgccacggttcagttccggcacagtgaaacacaactcgtaatcttcaccgccagagagcgcccagcgcagcgcctgttccggttcaacatggcgagaaagcgcatcagaaaacggcagcaatgccaggtcaatacgtgcgccgcagtcgctggctttcacgatatgcccgagatcggaaatcagaccgtcagagagatcgatagctgaatttgccagatcgcgcagtgcctgtccctgtaaaatacgcggcgatggacggagatgacgtttgatcaagtagtccgcatctttagcatcggcaacctgcaaacggttttgcaaaatcgccagcccggcggcgctatcgcccggtgtaccggtcacatagatccagtcacccggtttcgctccagagcgcgttaaggctcgtcccatcggaacaaagccgtggatacccaacgtcattgataatggcccacgcgtggtatcgccgccaatgagttgcatatcgtaataattgagaagatcaaacaaactgtcgctgaaggactcaagccacgcttcgtctacgtccggtaaggttaatgccagcgtcagccaggccggatcggcccccatcgctgccagatcgcttaggttcaccgccagtgctttatacgccagatcagcaggatcgatatcatggaggaagtggttgcccgccaccagcgtatcagtgctgatcgccagggtctgtttctcggggatattgagaagtgcgcaatcgtcgccgatgcccagttcgacatcaagacgagaacttcttacacggtcaaaataacgggcaatcagggagaactcgccacatgccatacgttatgcctcagcaggtaaaaaagaaaaggccggcgatcatggaacggtcttccgtgaatctaccggcctggatattactttttgttagggcgaatcacaggtgctgctttatcgagtacgccgttgacgaacttatggctgtcttctgcgccgaacgatttcgccagttcgatcgcttcgttaatggccactttgtatggcacatcgctacgtttagacagctcgtacagcgcaatgcgcagtactgctttttctacctgtcccagttcttccagcaggcgggacaggtatggcttcatcagtccgtcgaggtatgcggtgttagtcgccaccccggccagcagctcacggaagtacaggacgtcaacatcttttacatcctgttcagccaggaactggtattcaacatcagcgatgtcgttctgggacaactgccaggagtagagcgcctggacggcacactcacgagcgcggcgacgagcagcaggtttcacggatttccccttactaatttcaggccttgatggctttcaatacattaatcatttcaagcgcggtcagtgcagcttctgcacctttgttgccagctttggtgccagcacgttcgatcgcttgttcaatgctttcagtggtcagaaccccaaaagcaaccggaatttcgctgtcctgggcaacatgcgccaggccgttgcttgcaccaccagcgacatattcaaaatgggcagtgccaccacgaataaccgtacccagcgcaatcaccgcgtcgtatttaccggttttagccagtgcacccgccgccagcggcagctcataggcaccaggcacccaaacaacggtaatgttttcatcttttacctgaccgatacgtttcagtgcgtcaattgcaccttccagcaggctgtcattgataaagttgttgaaacgcgcgatggtgatggcgacgcgagcgtccggggtagcaacgttagcttcaataatgttcattttcttccttcgggttcgagtatggccccgcaggggggcggattttagcataatatttcgtgcgctgcttccctttcgagccgggagatcatgcacccactaaatgcaggcaaacatccgggcctacatgacgtatctctttgaatttaaattggggggcgtcggctaatttctcaagccctggcagcgtgcataatccgcgggcgtcgctgcctaatagtttaggtgcgatatagacaatcagctcatcgactaaacccgcctgcagcaatgcgccagcgagcgttggccccgcttccacccagatgctgttaatttgctgtttacccagttgcatcatcagtacaaccagatccagatgacctttatgctctggaatcagcaaggtacgcaccgtttccggccactcactagaatcttcctgcgtacgcgcgaaccaggtttcgccgggctgctgcacaatgcgatgttccggcgtcacgcgattttggctatcaatcacaatacgtactggctggcggagattttgttgcgggtagagcgcctgagtttgttcatccagttcagaccaacgcactgttaaggctggatcatccgccagcaccgtggcgctgctggttaaaatggcatgactttgtgcgcgctgtcgttgtacgtcgcgccgcgcctgaggcgaagtgatccactggctttcgccgctcgccatcgccgtgcggccatcaagcgatgcgccaagttttaactgaatataaggaaagccggtgcgcatccgcttgagaaagcctttattcaattgctcggcttcactcatcatcagcccgtggctgacgtcaatgccagcctgttgcagacggtaaagtccacgcccagcgacctgcgggttaggatcttgcatcgaggcaaccacgcgcgctacgccagcggcgatgagtgcgtcacagcacggtggcgtacgaccatgatggctacagggttcgagtgtgacataggcggtcgcacctttggctttttcacccgccatacgcaacgcgtgtacttcggcatgtggttcacccgcacgttggtggtaaccttcaccgacaatttcgccatctttgacaatgacgcacccgacattcgggttgggatgcgtggtaaaacgtcctcgttgcgccagctttagcgcccgcgccatgtaatactcgtcctgcacggcttagtcctccaggcgcgcgatctcttcgccaaattctttgatatcttcgaaactgcggtagacagaggcaaaacggatataggcgactttatcgagctttttcaattgctccatcaccagattgccaatcatcttgctcggcacttcgcgctcaccggtggcgcgcagctgcgatttaatatgattgattgccatttcgacgtcatcggaactcaccggacgtttttccagcgcccgcagcattccgctacgcaatttctcttcattaaacggttcacgcacgtcgttgctttttacaacacgcggcataaccagctccgccacttcaaaggtggtgaaacgttcattacacaccagac

SEQ ID NO: 233 - DNA, 22174 bp, Escherichia coli
  source 1..22174: mol_type = genomic DNA
aacctggtcgctaacttcaataccctgtttgtactggtgcaaatctccatcatggtggtgtttatcttcctggtggttcagggactgcataaaggagaaggcgttggcaccgtctggtcacttcagccgtttatcagcgagaacgcgcacctgatcccgattattaccggtgcgacgattgtctgtttctcgttcctcggtttcgatgcggtgaccacgctttcggaagagacgccggacgccgcacgcgtgatcccgaaagccatcttcctgacggcggtatacggcggcgttatctttatcgcggcgtcgttctttatgcagctgttctttcccgatatcagccgctttaaagacccggacgccgcactgcctgaaattgcgctgtacgtcggcggcaagctctttcagtcgattttcctctgcaccacgtttgtgaacacattagcgtctggcctggcttcacatgccagcgtgtcgcgtctgctgtatgtgatggggcgtgacaatgtgtttccggagcgcgtgtttggctatgtgcacccaaaatggcggactccggcactcaacgtcattatggtcgggattgtcgcgctgtcggcgctgttctttgatttagtcaccgcgacagcactgattaacttcggtgctctggtggcgtttaccttcgtgaatctgtcggtgtttaatcatttctggcggcgtaaaggaatgaataaaagctggaaggatcacttccactatttgctgatgccgctggttggcgcgctgacggtgggtgtgctgtgggttaacctagagtcaacgtcactgacactcggtctggtatgggcttcgttaggcggcgcatatttgtggtatctgatccgccgctatcgcaaagtgccgctgtacgaaggtgacagaacgccggtgagcgaaacgtaatagccggatgcgcggcgcattatcctgcctgagggtaacgcgccgcgccattaactataaaaagatgtatgacccggatcacgagtgctatcatccgcccttatgcttagcgcattaaccccaggggcaaataatgaaccacgatatcccgctaaaatattttgatattgccgatgagtacgcgaccgaatgcgcagagcctgtcgcagaggctgaacgcacaccgctggcccactacttccagttactgctcacccgtttgatgaacaatgaagagatcagcgaagaagcccaacatgaaatggctgctgaagcggggattaatcccgtacgcattgatgagatcgcagagtttttgaatcaatggggtaatgagtaattatttaattgcagacgatcggtcagtatcgttgtccggataaagcgttcacgccgcatccggctaacaatgacacgcactgcagcgtgctttaatgggtttctcacgatcgtaccgctctgctcctcgctaagttgttctgtgagttatagttatagagaaatcacgggtacgaatgttgaacagatggcgacgccacctgttcaacgaccaaccacacggccctcattacgacccctgaacacaaacggtaatggcaaatgtcattaaatattagtaagatagcctctttacataaaatcccttaatattatgcgccaggtattatcgtctcttttggtgattgctggacttgtgagtggtcaggcaatcgccgcgcctgaatcccccccgcatgctgatatccgcgacagcggttttgtctattgcgtcagcgggcaagtcaacacctttaacccatccaaagcgagcagtgggttaattgtcgatacccttgccgcccagttttatgatcgactgctggatgtcgatccctatacctatcgcctgatgccggaacttgccgaaagctgggaagtactcgacaacggcgcgacctatcgcttccacctgcgtcgcgatgttccgtttcaaaaaaccgactggtttactcccactcgtaaaatgaatgccgacgatgtggtgtttaccttccagcgaatttttgaccgcaacaacccgtggcataacgtcaacggcagcaacttcccctacttcgacagcctgcaatttgccgataacgtgaaaagcgtccgcaaactggataatcataccgttgagttccgactcgcccagccggatgcttcttttttgtggcacctcgcaacccattatgcttcggtcatgtcggcagaatatgcccggaagttagagaaagaagatcgccaggagcaactcgaccgtcaaccggtcggcaccggtccgtatcaattgtcggaataccgcgccgggcaatttattcgcctacaacgtcatgatgacttctggcgcggtaaaccgttaatgccgcaggtggtggtggatttaggctccggcggcaccggacgtctgtcgaaactcctgactggtgaatgcgacgttctggcctggcctgctgccagccagctatccattttgcgtgacgacccgcgcttgcgtttaacgctgcgtcccgggatgaacgtcgcctatctggcatttaacaccgccaaaccgccgctaaataatcccgctgtccgccatgcgctggcactggcgattaataaccagcgcctgatgcaatccatctattatggtacggctgaaacggcggcctctattttaccgcgcgcctcgtgggcctatgacaacgaggctaaaattactgaatacgatccggcgaaatcgcgcgaacagttgaagtcgttggggctggaaaatttaacgctgaaactgtgggtgcccacacgttcgcaggcgtggaaccccagtccactgaaaactgccgaactgattcaggcggatatggcgcaggttggcgtaaaagtggtgattgtgccggtagaaggtcgctttcaggaggcgcggttgatggatatgagccatgatctgacgttatccggttgggcgacggacagtaacgacccggacagtttcttccgtcctttactgagctgcgcggcaattcattcacagaccaacctcgcccactggtgcgatccgaaattcgacagcgtgttgcgtaaggcgctctcctcgcagcagctggcggcgcgtattgaagcctatgacgaagcgcagagtattctggcgcaggaattgcccattttgccgctggcgtcgtcattgcgtttgcaggcctatcggtacgatatcaaaggtctggtacttagcccgtttggtaacgcctcctttgctggggtgtatcgcgagaaacaggatgaggtgaaaaaaccatgattatcttcaccttacgccgcattttgttattgattgtcaccttgttcctgctgaccttcgttggcttcagcttgagctatttcacccctcatgcgccgttacaaggcgcgtcactgtggaatgcctgggtgttctggtttaacggcctgatccactgggattttggtgtttccagcattaacggtcaaccgattgccgaacagttaaaagaggtcttcccggcgacgatggaactgtgcatcctcgccttcggttttgcgctgattgttggcatccccgtggggatgattgccgggattacgcgccataagtggcaggataacttgatcaacgccatcgccttactgggcttttcaatcccggtgttctggctggcgcttctgttgacgctgttttgttcactcacgctaggttggttgcccgtttcagggcgtttcgatctgctctacgaagtgaaaccgattaccggttttgcgttgattgatgcctggctttcggactcaccatggcgggatgaaatgatcatgagcgcaatccgccatatgatattgcccgtgatcaccctgtcggttgcgccaacaactgaagtgatccgcctgatgcgtatcagcactatcgaagtgtatgaccagaactatgtaaaagcggcggcgacccgcggtttgtcgcgctttactattttgcgtcgccacgttctgcataacgcgttaccgccggttattcctcgcctgggcttacagttttccaccatgatcaccgaaatggtttttagctggccgggtttagggcgctggttaattaacgccatccgccagcaggattacgcagccatttccgccggagtgatggtgtgtggctcactggtcattattgttaacgtgatttctgatattttgggtgccatggctaaccctctgaaacataaggaatggtatgccttacgatagcgtatacagcgaaaagcgcccgccgggcacgctgcgtaccgcctggcgcaaattttatagtgacgcctctgcgatggtcggcctgtacggctgcgcggggctggctgtactgtgtatttttggcggctggtttgcgccttacggcatcgaccagcaatttctcggttatcaattattgccgccgtcatggtcgcgctatggcgaagtttctttcttcctggggactgacgacctcggacgcgatgttttaagccgcttactgagcggagctgcgccaaccgtgggtggcgcatttgtggtgacgcttgccgcgacgatctgtggcctggtactgggcaccttcgccggggcgacacacggcctccgctcagcggtgcttaaccatattctggataccttactggcgatcccttcgctgctgttggcaattatcgttgtagcgtttgccggaccgagtttgtcccacgctatgtttgctgtctggctggcattgctgccgcgtatggtacgttcgatttacagcatggtgcatgacgaactggaaaaagagtacgttatcgccgcccgtctggatggcgcatcaacgctgaatattctctggtttgctgtgatgccaaacatcaccgccgggctggtcaccgagatcacccgcgcactgtcgatggcaattctcgatatcgccgcgctgggctttctcgatctcggcgcacaactcccctcgcctgaatggggagcgatgctcggtgatgcgctggaactgatttatgtcgccccgtggactgtcatgctgccaggtgcggcaattatgattagcgtgttgttggttaacctccttggcgatggcgttcgtcgtgcgattattgcgggggtggaataatgccattactcgatattcgtaacctgactattgaatttaaaaccggggatgagtgggttaaagccgttgaccgcgtaagtatgaccttaaccgaaggtgaaatccgcggtcttgttggcgaatccggttccggcaaaagtttgattgcgaaagcgatttgtggggtgaataaagataactggcgtgttactgcagaccgtatgcgttttgatgatatcgatttgctgcgtctctccgcacgcgaacggcgcaagctggttggtcacaacgtgtcgatgattttccaggaaccgcagtcgtgtctagatccttcagaacgtgtgggtcgccagttgatgcaaaacatcccagcctggacctataaaggccgttggtggcagcgttttggctggcgcaaacgccgtgccattgaactactgcaccgcgtggggattaaagatcacaaagatgcgatgcgcagttttccctatgagttgaccgaaggtgaatgtcaaaaagtgatgatagccattgcactggcgaatcaaccgcgtctgctgattgctgacgaaccgacaaactcaatggagccaacaacccaggcgcaaatctttcgcctgttgacgcgtctcaaccaaaacagcaataccactattttgcttatcagccatgacttacaaatgcttagccaatgggcggataaaattaacgtgctttactgcggtcaaacagtggaaaccgcgccgagtaaggagttggtgacgatgccacatcatccttatacccaggcgctgatccgcgcgataccagacttcggcagcgcgatgccgcataaaagtcgcctcaatacgctgcccggcgctatcccactgctggaacagttaccgattggttgtcgtctggggccgcgttgcccgtacgcacaacgagaatgcattgtgacgccacgtttgacgggggcgaaaaatcatctctatgcctgtcatttcccgctgaacatggagaaagagtgagatgatcgaaacgctgcttgaagtgcgtaatttaagtaaaacgttccgctaccggaccggttggtttcgtcgtcagaccgtagaagcggtaaaacccttgagctttacgctacgtgaaggccagacactggcgattattggcgagaatggttcgggtaaatccacgctggcaaaaatgctggcgggaatgatagaacctaccagcggcgagttattgattgacgatcatccactgcattttggcgattattccttccgcagtcagcgtattcgcatgatttttcaggatccttcgacctcgttgaatccccgtcaacgtatctcgcaaattctggattttccactgcgcctgaacaccaacctggaaccggaccagcgtcgccaacagattattgaaacgatgcgtatggttgggctgctaccggatcacgtcagttactatccgcatatgttggcccccgggcaaaaacagcgtctgggtctggcgcgcgcgctgatattgcgcccaaaagtcattattgccgatgaagccctcgcttcactggatatgtcgatgcgttcgcagttgattaatctgatgctggaattacaggaaaaacagggcatttcgtatatttatgttacccagcatatcggaatgatgaagcacattagcgaccaggtgctggtgatgcatcagggcgaggttgtcgaacgaggcagcaccgcggatgtgctggcatcgccgctgcatgaactcaccaaacggctgattgccgggcactttggcgaagcattgacagcggatgcgtggcgtaaagatcgctaattttctgaatcctccttccagattatccacctcattctgacaagagattaaatcttgtcagaatgaggtgatggataaaataaaatcaaatgcgcgtgatttaagacgcaatctcactttgcaggaacgaaagctctggcgatatcttcgcagccgacattttggtgatttcaaatttcgccgtcaacatccggtggggagctacattctcgattttgcttgctgctcggcgcgcgtagtcgttgagctggatggtgggcagcatgatttggcagttgcctatgataccaggcgcactagctggcttgagtcgcagagctggaccgtgctgcgtttctggcataacgagattgattgtaatgaggaggcggtgctggagattattctgcaggaactgaaccgccggtcaccctcaccctgaaagggcgagggggccgaccgagccgaatagctgttgtggtgaaaacatggagacagtgctggagaatattcggcaaggtctgaaccatcccagccatcgccataaaagggttaggggctgtatgagcctgtttgttgctggggtaacaatatttgcacaatatggtcccctcgcccctctggggagagggttagggtaaggggaaaagcgcccaccctgccgcagcctgctccggtcggacctggcaactatagctactcacagccaggttgattataataaccgtttatctgttcgtactgtttactaaaacgacgaatcgcctgattttcaggcacaacaagcatcaacaataaggattaaagctatgggttttctttccggtaagcgcattctggtaaccggtgttgccagcaaactatccatcgcctacggtatcgctcaggcgatgcaccgcgaaggagctgaactggcattcacctaccagaacgacaaactgaaaggccgcgtagaagaatttgccgctcaattgggttctgacatcgttctgcagtgcgatgttgcagaagatgccagcatcgacaccatgttcgctgaactggggaaagtttggccgaaatttgacggtttcgtacactctattggttttgcacctggcgatcagctggatggtgactatgttaacgccgttacccgtgaaggcttcaaaattgcccacgacatcagctcctacagcttcgttgcaatggcaaaagcttgccgctccatgctgaatccgggttctgccctgctgaccctttcctaccttggcgctgagcgcgctatcccgaactacaacgttatgggtctggcaaaagcgtctctggaagcgaacgtgcgctatatggcgaacgcgatgggtccggaaggtgtgcgtgttaacgccatctctgctggtccgatccgtactctggcggcctccggtatcaaagacttccgcaaaatgctggctcattgcgaagccgttaccccgattcgccgtaccgttactattgaagatgtgggtaactccgcggcattcctgtgctccgatctctctgccggtatctccggtgaagtggtccacgttgacggcggtttcagcatcgctgcaatgaacgaactcgaattgaaataatcattctgttggtaaatattgggcggcgttctgccgcccgttatctctgttatacctttctgatatttgttatcgccgatccgtctttctccccttcccgccttgcgtcaggataacgatttcctttacgaccaaggagcgcccatggaacaacgccacatcaccggcaaaagccactggtatcatgaaacgcaatccagtactgcggagtatgacgttctgcctctggtcccggaagccgcaaaggtcagcgatccctttctgctcgacgtgatccttgatgaagaaacgctggctcccttcctttcatggctggtccctgcgcgcgttcttgcagtggaattgttccctgaccagcttaccgtgacccgttcacagaccttcaccgcttatgaacgcttgtctacggccctgacggttgctcaggtttgcggcgtccagcggttatgtaactactattcggcgcgacttacgccgctccccgggcctgattcctccagggaaagcaatcataggttggcacaaatcacgcaatatgcccgccaactggctagctcgccttctattatcgacaaccgatcgcgccagcatctgaatgacgtcggtcttactgcctgggactgtgtgatcattaaccaaatcattggttttattggctttcaggcgcggaccattgcgacatttcaggcttatctcgggcacccggtacgctggttacccggtctggaaatacaaaactacgccgacgcgtcactgtttgctgatgaatcaatacgctggcgaagcagctatgaggtggaaaaactacctgaagagtacacaaaaagttcaacagcagaactttgccaactggccgaaacactctctctccaccctatttcactttcccttctcgaaaggttgttaaacagtacacgggttaatacacagccggataataagcttgcggcgttgttatgcgcgcggataaatggcagtcctgcttgttttgccgcctgtatggattcatcaaatgaatataaaaaaatcagcccccttctgcgcaagggcgaaaatgaaattaaccaatgggctgaccgtcattctgttgagcacgctaccgttcaggcgatacaatggctgacccgagcacccgatcgctttagcgccgcccagttcagccctttactcgaacacgaaaaatcatcaacgcagattattaatctgctggtatggagcgggctgtgtggctggataaatcgcttaaaaatcgcgttgggtgagacatattaaccttgccgcgtcagacagattcgcgtaaaactgtcagccgctctaatggccaccaaaatagacaattatgtttcaggacaacccgctgctagcgcagcttaaacagcaactgcattcccagacgccacgcgctgaaggggtggtaaaagccacagaaaaaggctttggcttcctggaagtcgacgcgcaaaaaagttatttcattccgccgccgcagatgaaaaaagtcatgcatggcgaccgaattatcgcggtgatccacagtgaaaaagaacgtgaatccgcagagccagaagaactggttgaaccgttcctgactcgtttcgtgggtaaagttcagggcaaaaatgaccgtctggccatcgttcctgatcatccactcttaaaagacgccattccttgccgcgcagcccgtggcctgaaccacgagtttaaagaaggcgactgggcggttgccgaaatgcgccgtcatccgctgaaaggcgatcgttctttctatgctgaactgacacaatacatcacttttggtgacgaccactttgtaccgtggtgggttacccttgcgcgccataatctggaaaaagaagcaccagacggcgtcgctaccgaaatgctcgatgaaggtctggttcgtgaagatctgaccgcgctggattttgtcaccatcgacagtgccagcacagaagatatggatgacgcccttttcgctaaggcgttgccggatgacaaacttcagctgattgtggcgattgccgatccaaccgcgtggattgctgaaggcagcaagctggacaaagccgcgaaaattcgcgcattcaccaactatctgcctggcttcaacatccctatgctgcctcgcgagctttctgacgatctctgctcactgcgcgccaatgaagtccgcccggtactggcatgccgcatgacgctctccgctgatggcaccattgaagataatatcgaattctttgccgccaccatcgaatccaaagcaaagctggtgtatgaccaggtttctgactggctggaaaataccggtgactggcagcctgaaagtgaagcaattgccgaacaagtccgtttgctagcgcaaatttgccaacgccgcggcgagtggcgtcataaccacgcactggtgtttaaagatcgcccggattaccgctttattctcggtgaaaaaggtgaagtgctggatatcgtcgccgagcctcgtcgcattgccaaccgtatcgtcgaagaagcgatgattgccgctaacatttgtgcggcccgcgtactgcgcgataagctcggttttggcatctataacgtgcatatgggctttgatccggcgaatgccgacgcgctggcagcgttgctgaaaacgcacggtctgcatgtcgatgccgaagaagtgctcacgctggacggtttctgcaaactgcgtcgtgaactggacgcgcaaccaactggtttcctcgacagccgcattcgtcgcttccagtcatttgctgaaattagcactgaacccggtcctcactttggcctcggtctggaagcatacgccacctggacttcgccgatccgtaaatatggcgacatgatcaaccaccgtctgctgaaagcggttatcaaaggcgaaactgcgacgcgcccacaggatgaaatcactgtccaaatggccgagcgtcgccgtctcaaccggatggcagaacgtgatgttggtgactggttatacgcacgcttcctgaaagacaaagccgggaccgacacccgtttcgcagcggaaattgtcgatatcagccgtggcggcatgcgtgttcgtttggttgataacggcgctatcgcctttattccggcacctttcttacacgctgtgcgcgatgaactggtttgcagccaggaaaacggcactgtacaaattaaaggtgaaacggtttacaaagtgactgacgttattgacgtcactattgccgaagtccgcatggaaacccgcagcattattgcgcgcccggtcgcgtaatctcctttcacggcccattcctcatggatgggccgtttatttccccgctctaccttcgttatatccaggcagattttttaactgactttcgtttgaaaactggcgtttttccaaaactggattacaaataaatatataaaaaaaacaatgcgtttagccgccgttaatttcatgtaagtcatgttgttccttttatttaaccgcggactccgcagttaaccggaggatatgcatcatgaaaaccgttagggagtccacaacgttgtacaactttctcggatcgcacaatccatactggcggttgacggaaagcagcgatgttttgcgcttttctaccaccgaaaccacagaacctgatcgtactttgcagttatctgccgaacaggctgctcgcatcagggaaatgacggtcatcacctccagcctgatgatgagtctgaccgtcgatgagagcgatctttctgtgcatctggtaggacgaaaaatcaataaacgggaatgggctagcaacgcgcctgcatggcatgacacaccggcggttgctcgtgatttatcacacgggctttcctttgctgagcaggtagtttctgaagcacattccgcaatagtcattctcgacagccgggggaatattcaacgcttcaatcggttatgtgaagattacacagggttgaaagaacacgacgtcattgggcaaagcgtgtttaaactgtttatgagccgtcgtgaagctgcggcatccaggcgcaataaccgtgtattttttcgaagcggcaatgcatatgaagtcgaactgtggataccaacatgtaaaggccagcggctgtttctgtttcgcaataaatttgtccacagcggcagtggcaaaaacgagatttttttaatctgttccggcaccgacattaccgaagagcgccgcgctcaggagcgactgcgtattctggcaaataccgacagtatcaccggactgccgaatcgtaacgcaatgcaggatttaatcgatcacgctattaatcatgcagataacaataaagttggggttgtgtatcttgatttggataatttcaaaaaggtcaacgacgcctatgggcatttgtttggtgaccagttattacgcgacgtgtcattggctattttaagctgtctcgaacatgaccaggtgttggcgcgtccaggtggggatgagtttctggtactggcatccaacacctcacaaagcgcgctggaagcaatggcatcacgaattttgacccgcttacggctcccctttcgcattggtttaattgaagtttataccagctgttcagtaggtattgcactctctcccgaacatggttcagacagcacggctattattcgtcacgccgacacagcaatgtacacagcgaaggaaggcggacgaggacaattttgcgtttttaccccagaaatgaatcaacgggtatttgaatatctctggctggataccaacttgcgtaaagcactggaaaacgatcagttggttattcactatcaaccgaaaatcacctggcgtggcgaagtgcgcagtctggaagcactagtacgttggcagtcacctgaacgtgggttgattccaccgttggacttcatttcctacgccgaagagtcagggctaattgtgcctttaggccgttgggtgattctcgatgtcgtacgccaggtggcaaagtggcgggataaaggcataaacctgcgagtggcggtaaatatttctgcacgtcagctcgccgatcaaaccattttcaccgccctgaaacaggttctccaggaactcaattttgaatactgccctatagatgttgaactgacagagagttgtctgattgagaatgatgaactggcactgtctgttattcaacaatttagccaactaggtgcgcaagtgcatctggatgattttggtaccggctactcttcactttcgcaactggcgcgctttccgatcgatgccatcaaacttgaccaggtttttgttcgagatattcacaaacaacctgtctcgcagtcactggtccgggcgatcgtcgctgtggcccaggcattgaatcttcaggtgatcgccgaaggtgtagagagtgcaaaggaagatgcttttttaaccaagaacgggatcaatgagcggcaaggatttttgtttgccaaaccgatgcccgccgtcgccttcgaacgctggtataaacgctatctgaagcgcgcataagtagatgaatatatatacttagcgctatatcccgtcattatatatcgtattcctggatgataattagccgttgctgttaaacacttctcttttagcggcaatttttgcattattcattttccacttttgctataaggatgtccttgatgtctgaatttgatgcccagcgcgttgccgaacgtattgatattgtgttagatatccttgtggcaggcgattaccactctgcgatccataatctcgagatacttaaagcagaactcttgcgccaggttgctgaatctacgccagacatcccgaaggcaccgtgggagatttaacaatcgtgccttcaggttttcctatttgaggatgcccggcgcgtcagtatttttttatttagtattataacgttataagaattacagcgatgaattcccgacaacaaactattctacagatggtcattgaccagggtcaggttagcgtaaccgatctggcaaaagccactggagtttctgaagttaccattcgccaggatctcaacaccctcgaaaaactgagttacctccgccgtgcacatggctttgcagtttcgcttgatagtgatgacgtcgaaacccgtatgatgagcaactatacgctgaagcgtgaactcgccgagtttgccgcgtcactggttcaaccgggcgaaaccatctttatcgaaaatggtagcagcaatgccctgctcgcccggactctgggggagcagaagaaaaatgtcactatcatcacggtcagcagctacatcgcgcatttgctgaaagacgcgccttgtgaagtcattttgctcggtggcgtgtaccagaaaaaaagcgaaagtatggttggcccgttgacacgccagtgcatccagcaggtgcatttcagcaaagcatttattggtattgatggctggcaacctgaaactggattcaccggtcgcgatatgatgcgtaccgatgtggtcaatgccgtgctggaaaaagagtgcgaagcgatagtcctgactgacagctcgaaatttggtgctgtacattcatactccatcggtcccgttgagcgattcaatcgcgtgattaccgattcgaaaatacgcgccagcgatctgatgcatcttgagcacagtaaactcaccgttcacgtcgttgacatttaaccatttcccttctctacggatgatttgcagtttggcaaatcatccgctctaagatgattcctggttgataattaagactatttacctgttattaacacgcttaagatataaaattattatcagcgatataacaggaagtcattatcacctgcgtgatataaccctgcgcgcgagcagatttcacggaataatttcaccaggcttattcttatctattatagttatagagagcttacttccgtgaatcataaattcaggagagagtattatgtttgtaacgagcaaaaaaatgaccgcggctgttctggcaattactttggcaatgtctctgagtgcctgttctaactggtctaaacgggaccgcaacaccgcaatcggcgcgggtgcaggggcattaggcggtgcagtactgaccgatggcagtacgttgggtacattaggtggtgcagctgtcggtggtgttattggtcaccaggtcggtaaataatcgtaaataaatgtcgattatcgactcgcaattataatacgcttgattctgttcagtacgaaataactgaataatacgcacagtaaaatattcgaaagccacggatatatccgtggctttttatgttaaccgcctgcgagttttaccttcatccctttcgcttcaagtagtgattttaataaatcacgcttatcgccctggatttcaataactccatctttaactgctccgccgcagccgcattttttcttcagttccgctgcaagttttgtcagttcggcatcatcgagatcgacaccggtaatcaggcaaacgcccttacctttacgtccactggtctgacgctgaatacgcaccacaccgtcgcctttagggcgtacaggggccgctttgggctcatcaatacgtccggtttccgttgagtagaccagacggctgttggaatcactcatcatgcactccgctgtaaagaggcgttgatcgctttcagcgtctgcgctggatctaccgattgcgttaccgggcgaccaatcaccatataatcaacaccagccgacaacgcctgttctggcgtcataatgcggcgctggtcaccagcttcactcccctgcggacgaatgcccggcgtaaccagtttgaactcctgaccgaatacctgtttaaagcgcacagcttcctgagcagaacacaccacaccatcaaggccacatttttgcgtcagtgccgccagacgttctgcataatctgcaggtgacagtgtcatgccaagatcgaccaggtcgctggcttccatgctggtcaacactgtcacagcaatcaaaagcggtgcatctttgccaaacggaaccagtgcctcacgcgctgcggtcatcatacgcgccccaccagaggcatgaacattcaccatccacacgcctaagtcagctgcagcagcgacagcgtgcgcagcagtgttaggaatatcgtggaatttcaggtcaagaaagatatcaaaaccacgctgttgaagttcgcgcacaaactgtggcccaaacaatgtaaacatctctttgccgaccttcagacgacaatcgcgtgggtcgatcttgtcgacaaaggacagcgcgtcatcacgattatgataatcaagggcaacaaccacaggagaattcgtaacagcgcgggaagaagatgaagcagttaacgtcatgaccagaccttcttgatgatgggcaccggaagtggcgcgaaacaggtaaacggcgagcattctacccgtggaaataaaaaattaacagttgcgatttttcccctggcaggctttttctgcgccgtcgttgccggagcacaatggaacatcaataactagtatgttgtaactaaagtaggatttttttaaaaattacaggccatcaagaccgcgaatcggtttaatggttgaccaggcccgacaagacggacaatgccagtagagggtgtatgcggtaaaaccacatttctggcagcgataacgaggcttactacgtaccttttcgccaaccatgtcacgcagcaccatcaggctctctttggcacgcccttcttccgcttcatttaagtggtaatccattaacttatggaacacacgcatggtcggatgacgctgaagctggcgcgtaatatagacctgtgcggcctcactaccgtcgcgcgcttcgatgatatcagcaagcatcaattcagcatcggcaccggtgttctcttccaccgcgcgttgcaggaattctgcccattcggcagttttacccaactgctgatagcaggtttgcaacatttccagcgtttcgctgaccagttctctgtcctgggatatcacgcgttgcaaactttcgacggctttggcgtattctcctttcgccataaacacgcgtcccatcatgatggatacgcgggcgctgtttttatctgccgccgcccctttttttagcaaggtcatggcacgatcgagatcgtcgctggccatatgctgcagggctaactcacagtagaaatgggcaatttcgacgcgctgtttatctttacccagcttcaccaggcgttcggcaacatcaattgctttctgccactcactggtagcctggtagatttgtagcaactgttgcagagcgccaatgcggaagtcagtttcatcggtcagctgattgaacatgtcttcagcgcggtcgtataacccggcggccatgtaatcacgccctagttgttgaatcgccaacagacgctgttcataggtcagcgaggcgctttccattagggtctgatggatgcgaatagcgcgatcaacttcgccacgcgaacggaacaggtttccgagcgtaaggtgggcttcaacggtgcctgtatcctctttaagcatatcgagaaacaggtctaccgctttatcctgttgattactaagcaggaagttaacccccgctacgtaatcacgcgacaagcggttggcttcatcttgcttgttttgttgcgcacttctgcggcccatataccagccataggcagcggctacaggcaaaagcagaaacaacaactccagcatagaaagttattccttcgccgctgacgagtgcggcactacagccacgtcagtcgcgggtgaaagctggttttccagtcgctttattttacgttcagcgcgcgccagggaaacacgaactcgcagccagaacaggccacaaatcaaccaaccgatagcaaaccctgcagcaaacaataccgccagcaatgtggaaatacggtactccccttgcgctaacagataattaaacgtcacctgttgatcgttctgcgcacccaacgtgaccgaaatcacgaagatcgctaacaccagtaagaaaatgagtaaatatttcacattacttcccgttatgtggttagagcgaataaattatggtcaacttaccgcaatagccctttaaagtaccattttcgcgccgtctgcgaaatggcatccacgcgcattgttgatgatttaagggctaaattcggaaaatcaaccagcgttaactttcttgttctcgttgcgctatttcgcgattttcttccgcaggtggtgttaatggcccacaaattcgttgcgcaagccacgttgccaccgccaccagcgcccacgaaatcaacgtagctactaccagatcgcgtggccaatgcatcccgagcagcaggcggcttcccatgactcccgttgcccagaccagcaagatagcaatggttaacgttcgccgacgcggccacagcaaaccaacggccagcagtgcccaactggcagcaaacatcgtgtgaccggaaggaaaggcaaaccccgtctctttctgccagtgtgaacgcaaatattgtgggatatttttctcttcagccaactgttctttcactaaatttccgcgttctgctcgctttaaagtgtagaactcatcaaccggaatatgatgtgttttttccagccagataacaaaaggtcgtggttcctggactttgtctttgatccaggatttaacgccttgtcccacaaggattgcggccgccagaatggcaaataatacaaaggcagccttaatgcgaaaacgcagacaccagagaaaccagccgaataaaatcaaatgtgtaatgacgccccagggctgggtgacagtttcagtaacccaaaaagccgcttttagtagccaactttgttctccaggttgccaacgccagccagaaatccatacggctactggcatgacaagcaatagtgcagctcccactgcggtacgtctggcaatcgaacgcatggcctctcctttttgataagtcccacaatcataactgaaaacgccagttccaggaaaaattgacagatttgtgccattccgtgaacgatcgacgcgtcgtgattaggtgaaccccttctcgttatggcaaaataagccaatacagaaccagcattatctggagaatttcatgcagcttaaacgtgtggcagaagccaaactgccaaccccatggggcgatttcctgatggtgggatttgaagaactggcaaccggacacgatcatgtcgcgctagtctatggcgatatttccgggcataccccggtacttgcgcgcgtccattccgaatgtctgaccggtgacgccctgttcagcttgcgctgcgattgtggcttccagctcgaagcggcattgacgcaaattgccgaggaaggccgtggtattttgctgtatcaccgtcaggaaggtcgtaacattggtctgctgaataaaatccgcgcttacgcactgcaggatcaaggttacgataccgtagaggctaaccaccagttaggcttcgccgctgatgagcgcgacttcactctttgcgctgatatgttcaaactccttggcgtcaatgaagtccgcttgttaaccaataacccgaaaaaagtcgaaattctgaccgaagcagggattaatattgttgaacgcgtaccattgattgtaggtcgtaaccccaataacgaacattatctcgataccaaagccgagaaaatgggccatttgctgaacaaataaccctcttgcattgtgtaattagtttgcttgccggaagcaaaataaccggcaagcaaatacttgttacttcaacatattacgaatgacataatgcaaaatgccgtcgttctggtagtaggtcaactccgtcgcggtgtcgatacgacaacggcagggtacgacctcctggctaccatccgcgcgcgtaagcgtcaccggaaccgtcgcaccgggttgtagattttgcagatcgccaatatcaatcttctcttccccggttagtcctaacgttttacgcgttacgccttgcggaaattccagcggcaggatgcccatgccaattaaattcgaacggtgaattcgttcaaacgattcggcaatcaccacacgaattccaagcagacgaggaccttttgccgcccagtcacggcttgagcctgatccatactctttcccggcaatcaccgccagcggcgtttgttcctgcttatagcgcatcgcagcatcataaatagagactacgtcgctgtcaggtaaatgccgcgtcatccccccttcaacgccaggcaccatttcattacggatgcgaatattggcgaaggtgccgcgcatcatcacttcatggttaccacgccgcgaaccgtaggagttaaagtcttttcgctcaacaccccgaccttgtagatatcgacccgctgggctgtcgggcttaatactgcccgccggagagatatggtcagtggtgactgaatcccccagcattgcgaggatccgcgcaccgtgaatatcttccactggtgctggtgttgcctgcatttcatcaaagaaaggcgataagcgaatataggttgagtcctcctgccaaccgtaggtatcggatcgtgtgacgttaatttccttccactctgctgtgccttcaaaaacttctgcgtactctttgcggaacatttctgtggagacttgttctaccgcacgggcaatttcttgtgccgatggccagatatctttcagataaaccgggtcgcctttacgatcatgaccaataggctcagcagccaggttgatattcatatttcccgccagcgcataggcaaccaccagcggcggcgaggccagccagttagttttaaccagcggatggatacggccttcaaagttacggttgccggacagcaccgcaccgacggttaaatcgccttttttgattgccgtttcgataggatcgggcagcggcccagagttaccaatacaggtggtacaaccgtatcccacaaggttaaaccccagttcgtcgagatacggtgtcagtttcgcttttgccagataatcagaaacgactttcgaacccggtgccagcgacgctttgacccacggttgccgcttgaggcccagagttacggcttttttcgccagcaagcctgcggccatcagcacacttgggttagaggtgttggtgcacgaggttatcgcagcaatgaccacagcgccatcaggtaactgatactgatgtccgttcataacataatcgaccggctggcgatctttatgcgtggcattcacttccagttcgttactggcggcaaatgcttttggtacatcgggcagtgcaacgcgatcctgtgggcgttttggccctgccaggctcgcttcaacgtcattcatatccagttctaacgtactggtaaaaatcggttcatcgcccgggttacgccacatgccctgcactttggcatatttttcgaccaactcaacctgatcttcgctgcgcccgcttaaacgcatgtaatcgagggttacagcatcgattgggaagaagccacaggtggcaccatattctggcgacatattggcaatggtggcgcgatccgccagcggtagtgaatccagaccatcaccataaaattcgacgaatttccccaccacgccatgtttgcgcagcatttgggtaacagtgagaaccaggtctgtggcggtaataccttcacgtaatttaccggtaagtttaaagcccactacgtccgggataagcatggaaaccggctggcctaacat

SEQ ID NO: 234 - DNA, 21387 bp, Escherichia coli
  source 1..21387: mol_type = genomic DNA
aatcaggaaatcaccgtagcggagcagcagatcaaggcgttgccttattccacgatgtatttacgccttaatgaagggcaacgaatctttgtggtactgggatatatagaacaagaacaaagcaaatggttatcccaggataacgccatgctggttacccacaatggacgtcttttaaaaaccgtcaaacttaataataatctgctggaagtgacaaattccgggcaggaccctctgcgtaacgcgctggcaataaaagatggcagccgctggacgcgcgatattctctggagtgaagacaaccattttcgctctgcgaccctgagttctactttttcctttgctggattagagacgctgaatattgcgggtcgcaatgtgctgtgtaatgtctggcaggaagaggtgacttccacgcggccagaaaaacagtggcaaaacacattctgggtcgattcggctactggccaggttcgtcaaagtcggcaaatgttaggcgcaggggttattcccgtagaaatgacgtttcttaaacccgcaccatgaataaattacagtcgtatttcattgccagcgtactttacgtaatgacaccccatgcctttgcgcaaggaacggtgactatttatctgcctggcgaacaacagacactttccgttggccccgtggaaaatgttgtccagttggtgacacaaccgcaactgcgcgatcgcctctggtggcctggtgccttgctgaccgactctgcggcgaaagctaaagcgcttaaagactaccaacatgtcatggcacagcttgcttcctgggaagcagaagctgacgacgatgtggcggcaacgattaaatccgtgcgccagcagttactcaatctcaatatcactggtcgcttaccggtcaaactggaccctgattttgtacgagtggatgagaacagcaatcccccgttggtcggggactatacgctctataccgtacagcgtccggtgactattactctgctgggtgcggtttctggggccgggcaattgccctggcaggcaggccgtagcgttaccgattatctgcaagatcacccccgccttgcaggcgcggacaagaataacgttatggtgattacgcctgagggtgagactgtcgtcgcccctgttgccctgtggaataaaagacatgtggaaccaccgcctggcagccagctttggttgggcttttctgcgcatgtactgcccgaaaaatatgctgatttaaatgaccagattgtgtctgttttaacgcaacgtgttcctgactgatgaagaagaattcttatcttttaagctgcctggccattgccgtctccagtgcctgtcatgctgaagtattaacctacccggatccgctgggttcgtcgcaatcagactttggcggcacaggattgttgcagatgccaaatgcgcgcatcgcaccggaaggtgaattcagcgtcaactaccgggataacgatcaataccggttctactccacctccgtggcgctgttcccatggctggaaggcaccattcgttatacggatgtgcgcacacgcaaatatagccagtgggaagatttcagcggcgatcagtcatacaaagacaaatcattcgattttaaacttcgcctgtgggaagaaggtcactggctaccgcaagtggcgtttggtaaacgtgatattgctggtacgggtctgtttgacggtgagtatctggtggccagcaagcaagcggggccatttgatttcaccctcgggatggcatggggctacgccggtaatgcgggcaatattaccaacccgttttgccgggtgagcgataaatattgtcatcgcgcagagtctcacgatgcgggcgatatcagctttagcgatatctttcgtggcccggcttccatctttggcggcattgagtatcaaacgccgtggaatcccctgcgtctgaaactcgaatacgacggcaacaattaccagaatgatttcgctggcaaactgcctcaggcaagccatttcaacgtcggtgcagtttatcgcgctgccagctgggcagatctcaacctgagttatgaacgcggtaacacgttgatgtttggtttcactttacggaccaatttcaacgatctgcgccctgccctgcgcgatacgccaaaaccggcatatcaacctgcgcctgaatctgaaggattgcagtacaccacggtagcaaaccaacttaccgccctgaagtataacgcgggctttgacgcgccagaaattcagctacgcgataagacgctgtatatgtctggtcagcaatacaaataccgtgactctcgtgaagcggtcgatcgtgccaaccggattctggtgaataacctgccgcaaggcgttgagaagattagcgtgacgcaaaagcgcgagcatatggcgatggtgactaccgaaaccgacgtagccagcctgcgcaaacagctggctggtacagcgcctggtcaatcagagcaactgcaacaacaacgtgnnnnnnnnnnaagcagaagatctttctgcctttggtcggggctaccgtattcgtgaagatcgctttagctactctttcaacccaacactttcacagtcgctgggcggcccggaagatttctatatgttccagctggggctgatgtccagtgcccgctactggtttaccgaccacctgctgcttgatggcggtattttcaccaatatttacaacaactacgacaagtttaagtcttcgctgttgcccgcggactctaccctgccccgcgtgcgcacgcatatccgtgactacgttcgcaatgacgtttatctcaacaacttgcaggcgaactattttgctgacttaggcaatggtttctatggccaggtgtatggcggttatctggaaacgatgtatgccggtgtcggttccgagctgctttatcgcccgctagatgccagctgggcgctgggtgtggacgttaactacgtgaagcagcgtgactgggacaacatgatgcgtttcaccgattattccacgccaacaggtttcgtgacggcttactggaacccgccgacgctcaatggcgtactgatgaaacttagcgttgggcaatatctggcaaaagataaaggcgcaacgatcgacgtcgccaaacgctttgacagcggcgtggcggtaggggtatgggcggcaatcagtaacgtatctaaagatgactacggcgaaggcggctttagtaaaggtttttatatctcgattccattcgacttgatgaccattggacctaaccgcaaccgcgcggtggttttgtggacaccattgacgcgtgatggtggacaaatgctgtcacgcaaataccagctctatccaatgacggcagagcgagaagtaccggttggacaataacctgacgtaattcataacattacattgactgataaatataaaccaatgaaaaagaacatttttaagttttcggtactgacattggctgttctgtctttgacagcatgtacccttgttcctggtcagaatttatcgaccagtaacaaggatgtcattgaactacctgacaatcagtatgacctggacaaaatggtcaatatctatcccgtcacgccaggattgattgatcagttgcgcgccaaaccgattatgtcgcaggctaacccggagctggagcagcaaatcgcaaactatgaatatcgtatcgggattggtgatgtgttgatggttacggtctgggatcacccggaactaaccacccccgcagggcaataccgtagcgccagtgataccggcaactgggttaacgccgatggtgcgattttctacccctatattggtcgcctgaaagtggccgggaaaacacttacccaggtacgcaacgagattacagcgcgtctcgattcagtcattgaaagcccgcaagtcgatgtcagcgtcgcggcgttccgatcgcaaaaagcgtacgtcaccggcgaagtcagcaaatcgggtcagcagccgattaccaatattcctctgaccatcatggatgcgattaacgccgcgggcggtctgaccgcagatgcagactggcgcaacgtggtgctcacccagaatggcgtaaagaccaaagtgaacctctatgcgctgatgcagcgtggcgacttgcgccagaacaaactgctgcacccgggcgatattttatttattccgcgcaacgatgatctgaaagtcttcgtgatgggtgaagtgggtaaacagagcacgctgaaaatggaccgcagcggtatgaccctggcggaagcgctgggtaacgctgagggtatgaatcaggatgtcgctgatgcgacggggatttttgttattcgtgcaacgcaaaacaagcagaatggcaaaatcgccaatatttatcagctgaatgcgaaggacgcatcggcaatgatactcggaacggaattccagcttgaaccttacgacattgtttatgtcactaccgcgccgctggctcgttggaaccgtgtgatttctctgctggtaccgacgatttccggggtgcatgacctgacagagacttcacggtggattcaaacatggcccaactaaaatttaactcaatcctggtggtttgtaccggcaacatttgccgttcgcccattggcgagcgcttgctgcgtaaacgtctgccgggcgtaaaagtcaaatcggcaggtgttcatggtctggtaaaacaccctgcagaagcgacagcggcaggtggtgccgctaatcatggcgtatctcttgaaggacatgccggacgtaagctcactgctgagatggcacgaaattacgatctgattctggcaatggagtcggaacatattgctcaggttaccgcaatcgctcccgaggtccgcgggaagacaatgctgtttgggcaatggctggaacagaaagagatcccggatccctatcgtaaaagtcaggacgcatttgaacatgtctacggtatgttggagcgcgccagtcaggaatgggcgaagcgcctcagccggtaatttgagtttataaaatacgatgacaactaaaaatatgaatacgccaccaggcagcactcaggaaaatgagatcgatctgcttcgtctggtcggcgagttatgggatcaccgtaagtttattatcagcgtgaccgcgttattcacgctgatcgctgtcgcttactcgctgttaagcacgccaatttatcaggcagatactctggtccaggttgagcagaaacagggcaacgccattctcagtggcctgagcgatatgatccctaactcatcgcccgagtctgcaccggagatccaactgctgcaatcgcgcatgattctcggtaaaaccattgctgaactgaatctgcgcgacatggttgagcagaagtattttccgattgtgggtcgcggctgggcgagattaaccaaagagaaaccaggtgagctggcgatcagctggatgcatattccacaactgaatggtcaggatcagcaactgacactcacggttggggaaaacggccactatacgctggaaggtgaagagttcaccgtcaatggtatggtcggccagcgtctggaaaaagatggcgttgcgctgactatcgcggatattaaggccaaaccaggaacacagtttgtcctgagccagcgtaccgaactggaagcgattaacgcgttgcaggaaacctttaccgttagcgaacgcagtaaagaaagtgggatgctggaacttaccatgaccggtgatgatccccagttgattactcgtattctgaacagcatcgctaacaactatttgcaacagaatatcgctcgccaggcggcgcaggattcacaaagccttgaattcttacagcgccagttgcctgaagtgcgcagcgagctggaccaggcggaagaaaaactcaacgtttatcgccagcagcgcgattcggttgaccttaacctggaagccaaagccgttcttgagcagattgtgaacgttgataatcaactcaatgagctgactttccgcgaggcagagatctcccagctgtataagaaagatcacccaacttatcgtgcgctgctggaaaaacgccagacgctggagcaagaacgcaaacgcctgaataagcgggtatcggctatgccttccacccaacaggaagtgttgcgtttaagtcgtgacgtagaagcgggccgtgcggtatatctgcaattacttaaccgccagcaggagttgagtatttcgaaatccagtgccattggtaacgtgcggattatcgacccggcagtcactcagccgcagccagtgaaaccgaaaaaagcgttgaacgtggtgcttggttttattcttggcctgtttatttcggtgggtgccgtgctggcgcgagcgatgttgcgtcgtggtgtagaagcaccggaacaactggaagagcacggcatcaacgtttatgccactatcccaatgtccgagtggctggataaacgcacccgtctgcgtaagaaaaatttattttctaatcagcagcgccatcgtactaaaaatatccccttcctggcggtggataacccggcggattctgctgtggaagccgtacgtgcgctacgaaccagtctgcacttcgctatgatggagacggagaataacattctgatgatcaccggtgcgacgccagacagtggtaaaacgtttgtcagttcaactctggcagcggtgatcgcccagtccgatcaaaaagtgttatttattgatgccgacttacgccgtggttattcgcataacctgtttaccgtgagtaatgaacatggcttgtcggaatatctggcaggtaaagatgagctcaacaaagtgatccagcattttggcaaaggaggctttgatgtgattactcgcggtcaggtgccacctagcccgtctgaactgctgatgcgcgatcggatgcgtcaattactggaatgggcgaacgaccattacgatctggtgattgtcgatacgccgccgatgctggcggtgagcgatgctgcggtcgtgggacgctctgtcggcaccagcctgctggttgcgcgttttggcttgaacaccgccaaagaggtgagcttgtcaatgcagcgtctggaacaggctggcgttaatattaaaggcgcaatcctcaatggtgtgattaaacgcgccagcaccgcttacagttacggctataactattacggttatagttactccgagaaagagtaaaactgaaggtaaagtgaccggatgcggcgtgaacgcctcttccggtctacgcattagacagttcttcgtttgtcatcagcctcagagcattcaggtaactgaatgctcttttttatgcattacaaactgcacgccggtatgcgtgcttcattcacgatttgcgtaaaacctgccaacgaacacatgccctgcgcatttcgctcttcacatcctgccagggtcagtttcacctctccgggcggcgtatttaatgatagcggcgttttatcacgcatctgctgtaaagtctggaagaccagcgaaacctgaatccactggctgttatcgctaagccgacgccagcgttcaaacaccagttcaccacctggcggcgtgttatccggctgaccgggaagcgtccagttgagctccagtgcgccgccgagatttgccagattagtatcgtgtccggcgataaacagcactgaagtgggtaatgtcacaccatacgcctgtttttgcggtggatggggcgtcaacgctgtcttgatcaaatctaataacggggtggcgcggctgcgggcaacctctggcgtgcgttgtagcaaataaaattgcgcgttatgcaaacttagcaaggtgttccactggtgtgaatcggtgatccttccccaccccggctccggcattccctgtgcttgttgcaggagaaatatctccgtcagcattgatgcgaggcttaccgcaccggttaatgagacattgtcggcgctcaccttgagttccgatggtaatgcctgcgttaatgaacagctttcgtcctgtttctcacgtttaaggcacaagtttgattgcggaaaattaagcacccgttccagttcgcgaaacgccgtttgccgatgcccggtaaagtcagcaattgcccctcctgccctgctgaggatcgcgtcagtcacgttcgcgttatccagttggcaaacgccagtttttagaggattaaataacggatcgggactggacgtatctgcctgggtatgtacggttattgcacagtcaggtgccagcccggcggcgaaggcttcgcctgttttacgggtacgctcgtcgacatcagcaataatcgcgacctgaccagactgcgggcagccctttttcgccagcaatccgtcggctaccagacgctggcgttggtaatgtccgagataggcgattagctcaccaccgcgcggtgtcagccaacccagttttaccggccaggttggccatgcgtctggggtgacatcctgcatcagttgcgtggccttggttggagcacgcacaccatgacgactgacaatcaccacactttccagcttcagctccggctcactctgagcgaatgcagattgcggggttaacggaatcagaagagataaaaatgggattaagatcgctttcatcgatatgtttccgcttttcatatctgacattattgattgcctgatgcgatgctaatgcgccgcatcaggcctacgttcgttaacttttcagacgcgggtccagccataccaacacaagggtggagagcgaacacatcaacaaaatgccgacgaaccaaagtaaataccacattgttcctgttccttagtacagctcgttttcgttacggcggagagtttctgtcgtcatgcgtccccacattttgtagtagctccagagagtgtagagcaacacaataggcaaaaatatcagcacgattaccaacataatgctcagcgtcagctgactggaagtgctgtcccacaacgtcaggctggagattggactcacgcttgacggcatgacaaaggggaacagcgtgatgcctgccgtgaaaatcacgccaaattgcatcaatgacgccatcaaaaatccccaacccgggcgaccacgataaatcgccatcaccgtcagcaatgggcagaagaaccccagcagcgggaagatccacaaaacgggcgactcgacaaaattattcatccaggcaccaggtagcactgccaccagtttcattaacggattggaaggaccgttagcatcctgggcgagcagtacaaagccatcaataccgacccacagccagtaacccgccagcaaaaagcacagcatcaccaacagtgcagcgcgtttagtcgccagctgtgaacgcagatgaatcacaccaacagttttcagttgtaaccagacgccaccttgcaaaatcaccatcccaaggctgagcaatccgcacaataaagggaatggcgtcagcagttgccagaagctgccgagatactccacgcgtaattgcggtgtgaaggcaaacggcacgccgagcaacaagttgccgaaggcgataccgaagactaccggcggcaccagactgccgatgaccagaccggcatcccacattttacgccagcgtgcatcggcgatttttccgcgataatcaaaggccagcgggcggaagaacagcgagcacagcaccaggatcatcgccacataaaagccggaaaacgccgctgcatacactctgggccaggcggcaaataatgccccacctgcgaggatcaaccagacctgattgccttcccagtgcgcaccaacgctattaatcactatccggcgttcatcatcatcacgcgccaccagcggcagcaaacagccaatccccatgtcaaatccgtcggagatcataaagaccaccaggatcacgccaatcagcagccaccagatgaagcgcaatgtttcataatcaaacatgattttctcctttacccctgttgctgcgtcggttgttcactctgcatcgcgctcggccccagacgggcatatttctgcattaggtagacttcggcgattaagaacagggtgtaaagccctacgatcatgatcagtgagaaagccagttgtcctgtggttaaagcggagtgcgcggagtatgtcggtaagatgtcctgtatcgcccacggctgacgaccaaactcggtcataaaccacccggcttcaatcgcaatccacggcaacggcaaactccagagcgccattttcagcacccagcgatgctggtcgattttgccacgcagcgtctggacaagcgcaatcagcatcaccagtagcagcagggaaccacagcccaccatgatgcggaaactccagaataccggcgcaacctgaggtatcgcgccacgcatcgccgcctggtactgtgcggctgtgacatgattcatatccggcgcatagcgggagagcaacatgccgtagcccaggtcaccttccagttcccggaatgcctgcaacacatgcggctcacgattgccttgcgatatttcctgcattaacagccaggccatacgtccgcgttgcaagcgtgggtaggtttcagccatcaaattcttcagacccggcacgggtttatctaatgagtgagtggcgaggatccctagcagcgcgggaattttgagggcaaaggcgttacgctcttgatcctgttccggccaggcaaccacatggaacggtgcaggtgcaggttccgtttgccactccccttccatcgccgccagttttaccggttgtacttgcgcgacttcatacgcagaactgtctccgagttgcagggtaccgataatcgccagagtaccgaagacggaaccgatggcaaacgagcgtaatgcgacatcgcgctcccgtccgcgcagtaaataccaggcgctgatcgccataataaacatggccccggtcacgtagcccgccattacggtgtgcacaaatttcacctggctgaccggattaaagaccagctcgctgaagctggtcatctccatacgcagggtgtcgatatcaaaatgcgcaccggtcgggtattgcatccaaccattggcattcaatatccacaacgcagagagatttgaaccgaacgccaccagccacgtcaccagcaggtgctggtatttattcagccgttgccagccgaagaagaacagcccgacaaaggtggattcgaggaagaaggccattaatgcttccatcgccagtggcgcgccaaaaatatcgcccacatagttggaatagaatgaccagttagtaccaaactgaaactccatggtcaggccggtagccacgccaagagcaaaattgataccgaagagcttaccccagaagcgcgtcatatcgcggtagattgttttgccggtgaccacgtaaatggtttccatgatagccagcaaaaaaatcagccccagggtaaggggtacaaataaaaagtgatacagcgcggtcagagcaaactgccagcgcgataaatcaatgacatcccacatgcgcactcctgtaggcgaagagagaaaaataacccgataatggtagatctccctctttatcctgaaactctacgaccagaggtattcgccgattgcgatattcataagactgaaagcgatacttaccgtctttttacgtcggtgcagcttccgccagccactgacatacctcgctaagccgctgcgcagagtcgaccaaatcttctggcgctgccagcaccacttccggtattgggcagatttcataactttccagtaacgggccttttaaggtgtccgtacagcgtaaatgccagacatggcgtaaccccgtggcgttgatatagctctcgccatagccaatggtacgaatctgaatatttcccggcccacagagacgtgagagaaaaagccgatcagcctcgctgatgggtaattgcgtcagattaatgctgtgcggctgcgcgtcggggttacgtacatgtgccagtaactcatgcgccaacggtaggccattcatcaggccatcaatgggcggcggtaacagcgaatctgtcggcaagaaattttgcgttgccgcctgccacaacgccagcggcgcgcagccagcctccagtttgtcctccagcaacttttcgccgcgacgtctgcgcacccgccataatccgcagaagatcgcctcctgtatttcactttcactgtcgtcagcctgctgaatgcgcactgacacttccccttccccgagaagcgtattgataaagtgacgatcgtcggcgttgagatttaacagatcgactgccagcacctcgcccaacggcggttggcgttcgcttagttgatgttgtaactcgtttaacagcgcaatcacctgcgggctgtgagcacattgctccagggccgccatactcggttcatcattcacctgacaggtgatcggcagtggattcatgctgaaactgtcatcgttcggttgcgttcctggccccagcagatggaaaaaagtttcgctcatgaggcacgctcctgctgcggttcgacaagcccgcgcatcaggtttatcagttccgcccacgggtgaataccattcagcacgccgcgatagtttccgccggtaaacactaaagtggcaggaaagcgaaagacgccaaagcgatcgccgatggcttcgctctgctcaaggtcagcaatcgccacctgccatgtatagtcgggaaactcgtgcagtaattcgccaatcattaccggattatcgctgacctctggcgtgcgtttcgggtcactgcttaataacaccacgccgtctggcgcttgcgtaagccagtcgtcaagacgggattcactgactggcgtccagccgcgcgccagcattcgttgccacaacgcatcaaatggcgtgtcgttgctcatccctgctcctcctgtgtcatccggtactggcgcaagcgaacgccttcgtaattttccatcgacagacagtcataattgagacagcgcgattcattagccggttgcggcacaattccccacgcagccagctgcgccagcgccgcctgttccgcagcgggcagttgctcccgtgccagttcgctcaggctaccgccgtagtcgtcgagcattgcgggttgcagaccgacgagggcaatatgtgctggcagatgtccgcggatatccgccagcgccaacacttcggagaaactgttctgatgcaggctcattttcttcgcgctgagataagccggaatgcgttctccggcataggttcgcagcgttccaggttccagcccgtagtcaatggcatcgagaatcaacagatggctggcgctttcgacataccccagcaagttcagtccctgagtaccgccatcgacaatctccacatactcgggccagtggtaatgggcatacagccgttccgccacccgcacgccgaagccttcatcggcccacagcaggttgcccagccccatgaccaccacgcgttgctcgctcatgaacgctccttgttacttattttgccaaatttgtggctacggtagccgttgaccatggtggagatcaccgtgtcgtcggacatgatgtcttcacgcagcgccatgtagacatgaccgatcacaaacgcgccaatcagccacatccccagccgatgccagctgtgaatgtccattgagttgccacccgtccagtagaaaaattccaccacataacggaacggcgcaaaaatagcgtactggctgtgttcgctgtacagcgcaaaaccagtgatgatcataaagaccgacatcaggaaatagccgaacatcgccgcctgggcgatgggattatggcctatatcggcactcggacgttttgccagaaacagataccagcggatttcataccacacgccctgccaccagcttttacgccataccggcacgataaacagctcgcgggagtatcgattgccaacaaaagcccagtagatccgcatcagcaaaaccacggtaaaaaccatcccggcgctgaagtgaattaacctgatgtagcccatatagaacagatacgtcgcctcgccgctgacggaaggtagcggcttgccgataaagtatccggtgaccatcaacaccgccatgcataacaccgtcaaccagtgccagatgcggactggcgcttcaaagacatagtggctgacaacgttgtcgcttttctgttgcatgatgattctccttcgctgttaacgcacctgcacggagatcagctcgctaccgtcgtcgcccagcacgtgtgttgaacaggcgaggcacgggtcaaagctgtgcagagtacgcaggatctccagcggttgctcggggatcgccattttggtgttcatcagcgccgcttcataagcgccaatctgccctttgggatcgcgcgggctggcgttccaggtggtcggcaccacgcactggtagagatcaatcttgccatcgcgaatggcggcccagtggcctaacgccccgcgcggcgcttcggtaaaaccgacaccacggcactctgtcggccaggttgcaggttcccatttttccgtggaagcagtggcgagattgccgtttttcaggttggtcatcagcttgtcgaagaaatactgcaacttacctgcggcccactgcgcttcgtgcgcgcggcacaaaatgcggcctaacgttgactggataccggaaagcggcaggttcaacgccgacatcatgcgatcgaccgactcaacggtcgcagcatcgcctttgtgataagcgattaacgtgcgcgccagcggccccacttccatcgcgttaccgcgccagcgtggcgctttgatccacgagtagcgttcctgttcattcagctgctgaatgttggtatcgctgcctttgacatcgccggggttgtaccacgggtcggtgatgccatcaaacggatgacgcccgacctgatcgttgggataacgataccaggcgtgatcgacaaactcctgcacctgctgcggatcaaccaaatccactggcagcacattgttgaaatcgccgttaatcaccgcgccgccaggcatcagcagacttttctcaccaaagtcgttggcaatatccgggaatgccccgtagctgaggacacatttatcagaaagacccgtgccgatttcgctccacggtttgttgaactgaccgatggctaaggcgtcggggatcatcacgttgttaatgaagtccgccgtgcgggtgataattgactgcaccaggttcaggcgttccatattgactgccccgaccgcgccgctttcgtcaatgttnnnnnnnnnngcgcaaggcatcccgccgacaatccagtttggatgcgggtttttaccgccaaagaccgcgtggattttgacaatttcacgctggaaatcgagagcttcgagatagtgggcaaagcccatcaggttagcttctggcggcagtttgtactgcgggtgcccccagtagccattgcggaagatccccaactgcccgccttcaacaaattttttcaggcggttttgtacgtcgaagaaatagccaggggatgatttcggccaagaggagagactttgcgccagttcggaggttttccgcgggtcggctttcagcgcatctaacacatcgatccagtccatcccggcaagctgatagaagtgcaccagatgatcgtggcaccagagcgttgccagcataatgttgcggatgatattggcgttgtccggcactttaataccgatagcatcttcgatggcgtaaaccgaagccagggcgtgtacgccagtacagacgccgcagatacgttcaacgaacgcccacgcatcgcgcgggtcgcgcccttgcagaatgatctccagcccgcgaaacatggtgccgcaggggacagcnnnnnnnnnnacggcattggtgatcacattctgatcgttaatattcacttcgcagcgcatgtggccttcgatgcgcgtaatcgggtcgaccaccaggcggcgtccggcattattgatggtgtatccctgagtttcgtactgagtgctcatgcctgtttatcctcattgcctggctgatgttcggtttctgtaggttgctggttatgacgtctgcgctggtcaacggcgctggcgactgcgtgcacaccaacagccgctgccaccacgccaagcgcggttaaaccgacggtatcggcagtggaatgagtacccatttgcggaatatcgaccacgcggctgtagaacgaaccgcgatcccagaaaccattttccgcacagcccaggcagccgtgaccagactggattggaaaagaaacgccatcattccagcgtgtggaggaacaggcgttataggtggtaggccctttgcagcccattttgtacaggcagtaacctttgcgggcagcgtcatcatcccaactctggacgaactctccggcgtcgaagtgagcgcggcgatagcatttatcatggatacgctgaccataaaacatcagtggacggcccattctgtcgacatctggcaagcgctcaaaggtcaccatgtaagtaatgatggcgctcatcacatccgggatcggcgggcagccaggtactttgataatgggtttgtcggtgatgactttgtcgataggcgttgcctgcgtcggattgggccgcgcggcctgcacgcagccccaggacgcgcaggttccccaggcgataatcgcgctggctccggcagcggcacgtttgagtttctcaataaacggtcgaccgctgctgatacagaacatcccctgctcgcccagcggcggattgccttctactgcgaggatatatttgccattgtattgcgtgatgatgtcttcaaagacttcttccgcctggtttccggcggcagccatcaaagtatcgtcgtaatcgagagaaataagggaaaggatgacgtccttcgccagtgggtgagcggagcggataaaagattcggtacagcaggtgcattccagaccgtggatccataccaccggaatgcgcggtttgttctccagcgcccaggcaatctttggtgccattcccgcgcctaatcccagcgacgtggcagccagactacaatatttgagaaagctgcgccgggtaacgccctgacgccgcatggcctggtaaaatgtttcctcgttattcatatcgcacgtctcttctcctagcaacaccggcaggacaccgggcgcttatggtcggcaagcgacgtccctgtagcaaggcaaaccatcgcttcacgtgagatgctgaaaacgaaagctcatccttctgcactggcacacgtcgccagaaagtattgttaataaagcgtagtgaaacttttgcacaaaacaatacaaactgtgtggatttatcttttagcgataaaaatggacctatttttcttttggccgggcggtggggatgtttagccggttgctaaacgagtaaaagagaaggaattcatggtgatgaaatgatcaatctgctgttatttcacgctatcaatgcacttttggctgtttttcaggcaaacaaacaaattaggggtttacacgccgcatcgggatgtttatagtgcgcgtcattccggaagtgtggccgagcggttgaaggcaccggtcttgaaaaccggcgacccgaaagggttccagagttcgaatctctgcgcttccgccaaataagataaggggttagctaaatgctaacccctttttcttttgcctgtcgaaattctcagggcgttatatttgcttaatgacctgataatccgctgttaaacctgttccagatcaaatgcgtaaagatgggtaaaacttctgggtgcccttacgcattatcattatgctgcttaattaattacatctgtcatagagagtgactcaatggatcgtattgttagttcttcacatgaccgtacatcactgcttagcacccataaggtgctgcgtaatacctattttctgctgagcctgacgctggccttttcggcgattaccgcaactgccagtacggtgctgatgctgccatctccgggtctgattctgacgctggtgggtatgtatggtttgatgttcctgacctataaaacggcgaataagccgaccgggattatctccgcattcgcctttaccggttttctgggttatatcctcggacctattctgaacacctatctgtctgccggaatgggtgacgtaatcgctatggcactgggcggaacggcgttagtgttcttctgctgctctgcatatgtgctgaccacccgcaaagatatgtcgttcctcggcggtatgctgatggcgggtattgtggtggtgctgattggtatggttgctaatatcttcctgcaactgcctgctctgcatctggcgatcagcgcggtcttcattctgatctcctctggcgctatcttgtttgaaaccagcaacatcattcatggcggtgagacgaactatattcgtgccacggttagcctgtatgtttcgctgtacaacatcttcgtcagcctgctgagcattctgggcttcgctagccgcgattaatctcacccgctaacactttcatagcctcgctttatgcggggctttgttttttgttacactgccgccagtctgattaaggtagtaataattatgctgatcttcgaaggtaaagagatagaaacggataccgaaggctatctcaaagaaagcagccagtggagtgagccgctggctgtggtgattgcagagaacgaagggatttcgctgtcgccagaacactgggaagtggtgcgttttgtgcgtgatttctatctggaattcaatacttctccggcgattcgtatgctggtaaaagcgatggcgaataaatttggcgaagaaaaaggtaacagccgctatttatatcgactgtttccgaaaggtccggctaagcaagccaccaaaattgctggcctgccaaaaccggtaaaatgtatttaacggatacgaaaatcggctaattcccccgagggatgatgcggctcgctaagcacccgttccacacgcgcagaacgcgggccgccactctttaaccactgcattaatttttccacctgcccttcttcaccgcaggcaaccacttccacgctgccatcgtcaagatttttggcgtacccggttaaacccagtcttttcgcttcatactgtgtggtgtagcgaaatcctacgccctgaactcgcccgtaaacccaggcaattatgcagactttcgacattgctgctctccttatccttaatggacgcgttgcaaatccatggaaaactccggacaatgacgcccatttctttgcatcgacagaaaagtaaattatgagtgtacgtttagtgttagccaagggcgcgaaaaatcattacttcgtcgccatccgtgggtcttttccggggccgttgcccgcatggaaggtaaagccagcctcggtgaaaccatcgatattgttgatcatcagggaaaatggttagcacgcggcgcttattcgccagcttcgcaaatccgggcgcgcgtctggacgtttgacccgtctgagtctatcgacattgcttttttttcccgccgtttgcaacaagcacaaaaatggcgtgactggctggcgcaaaaagatggcctcgacagctatcgtttaatcgccggagaatctgatggcctgccgggtattactatcgatcgtttcggtaattttctggtgctgcaactgctgagtgctggcgcagaatatcagcgcgcggcattaattagtgccctgcaaacgctgtacccggaatgtgcgatttacgatcgcagcgatgttgcggtacgtaaaaaagaagggatggagctgacccagggcctcgtcaccggcgagttgccacctgccctgctgccgattgaagaacacggcatgaaactgctggtggatattcagcacggacacaaaacgggctactacctggaccagcgagacagccgcctggctacccgccgctacgttgaaaataaacgtgtgctgaactgtttctcctataccggtggtttcgccgtatcggcactgatgggcggttgcagccaggttgtcagcgttgatacctcccaggaagcgctggatattgcacggcagaacgttgagctgaacaaactggatctgagcaaggctgagtttgtccgtgatgatgtctttaaattgctgcgtacttatcgcgatcgcggtgaaaaatttgacgttatcgtgatggacccgccgaagtttgttgagaataaaagccagttgatgggcgcgtgtcgtggctataaagatatcaacatgctggcgattcagttgctgaatgaaggcggtattctcctgactttctcctgttccggtctgatgaccagcgatttatttcagaaaatcatcgcggatgccgcaattgatgccggccgtgatgtacaatttatagagcagttccgtcaggcagccgatcatccggtgatcgctacctatccggaagggctatatctgaaagggtttgcctgtcgcgtcatgtaacttgaaatgtggaattttacccttatatcaaaggtaaagatttcccgggaggtgactatgattgccagcaaattcggtatcggccagcaggtccgccattccctgttaggttatctcggagtggtcgtggatatcgacccggtttattcgctctctgaaccgtcgcctgatgagctggcggtgaatgacgagcttcgcgccgctccgtggtatcacgtggtgatggaggacgataacggcctaccggttcatacctacctggctgaagcccagctaagtagcgaattgcaggatgaacatcctgaacagccatccatggatgagctggcgcagaccatccgcaaacaactccaggccccgcgtctgcgtaactgatccctgaacgaatccccggaaggtttttgccttccggggattttttatttggccaggcccaggcgagggatctcaatagccgggcagcgatccatcaccacatttaacccggcatcccgtgccagtactgccgcttgctcattaatcacccccagttgcatccagagggttttcgcgccaatggcgatagcttcctgcgccacgccccacgccgcttctgaattacggaaaacatcgaccatatcgactttttccggaacgtctgccagcgtgccatacccctgctggcccagcagcgttttgccggcaacttttggcgaaaccggaatgacgtgatacccctggtcgagtagatatttcatcacgcgatagctgggacgatcgggtttgtcgcttgcccccaccagcgcaatggtgtgagtggacgttaaaatacctgcaatatcggtttctttcattatttcctccagactgtttaacaaagtgtacgacaaagccgacatgccaaccatgcagctaatacga

SEQ ID NO: 235 - DNA, 21269 bp, Escherichia coli
  source 1..21269: mol_type = genomic DNA
cggcggaactatttttggtaccggttcaggagggggcgtagcggcaacggtgcgcaactggtcgatcaactctttacgcgaggtgtcattatccagcacatccgccagtgcgccataggccgcttttttttgttcgatatccggttccggggccggttcagtcgttgagtccgttgtcgttgtggttgtaacgccgggtatggataccgcgtgggcaggtgcgcccagcaggcagaagaggatgaacaggatccaccgcatgactcctccagtgagaaaatagagcaaaaagataagtatagatgctggaggaggggcgattttaaatgagaggaatctggtgtgcctccctttcgggtgaaagggaggaagggatattaagcaggttgctgacaacgtgcgggcttttttgccggatgcggcgtgaacgccttatccgtcctacaagttcatgcaattttaataagttgccagatatcctgtaggcctgataagcgtagcgcatcaggaaatgtgtcttattaagagacgtgctgcaaaaattcctgcaagcgctggctcggcgggttcttgatcaacacctgcggattgccatcttccgcaatccggcctttgtcgataaagatcagccgcgaagctactttctcggcaaaaccgatttcgtgggtcacgatcaccatcgtcatcccttcttcagccagatcctgcataaccttcagcacttcatggcgcagttccgggtcaagagcggaagtcggttcatcaaacagcatcattttcggcttcaccgccagcgcgcgggcaatcgccacacgctgctgttgaccaccagaaagttcggaagggtagtgatgtgcacgttctgccagaccgactttcgccagcagctcacgtgccagtttttccgcctcttctttgttcgcgccacgcacgcgtagcggaccaaacatgacgttttccagcgccgtcagatgcgggaagaggtaaaactgctggaacaccatacccgcttcctggcgaatcaggcgctcgtcaactttcggatcgttaaccttcaggccatcgacaatcagatcgccggaggtgatttcttccagtttgttgatgcagcgcagcagggtcgatttaccggaaccggacggcccgataatcaccacgacttcgccctgagcaatgttcaaatcgatattgtgcagcacctgggttggaccaaaatgcttggagacgtttttaaattcaatcacaggattttcatccttctttccagacgacgcagaataaagctcagcaccaaggtaataatcagatagaacaccgccacggcgctccagatctcaagggcgcggaagttaccggcaataatttcttgcccctgacgggtcagttccgccacgccgataacaataaacagcgaggtgtctttaatgctgatgatccactggttacccagcggcggcagcatacgacgcagtgccagcggtaaaatgacgtagcgaatggtttcccaacgtgaaagaccgagcgccagtcctgcttcacgaaaacctttgtgaatagacagcaccgcaccacgcgtgatttccgcaatgtacgcgccggagttgatcatgatggtgaccaccgccgcagtaaatgggtcgatgcgtaagtcgttaaacgccatcggcagggcgaaatagataaacatcacctggacgacgataggtgtgccgcggatcacttcaataaagaccagcgcgacgtggttggctatccaaccaccgaaggtgcgtgcaaaacctgccagcaatccgattaccagaccgcctgccagaccgaggaccgaaatccacagggtcattttggcaccttcaatcagaagcggaatggcaggccagatggcactccagtcaaactgcatatgttgttcctgttaccgtggtgtaaataatcaaattcagggtaattaatggccccggagcgggtttgcgcccctcaccctaatcctctccccataggggagagggaactgccagtgcgttttacaggtgtagcgttattatttcggttcagtaccgaaccattttttgtagatttcgttgtaagttccgttctcgcgcagggttttcaacgcgccgttgactttgtcacgcagctcgtcgctacctttcgggaacgcaataccgtattgctgcgcttccagagagtcacctaccgctttgaactgaccgttaccggcggttttgatgaagtaaagaatgtttggcgtatcgtgcagaacggcgtctgcgcggttggtgcccagttccatataggcgttatcgatgttcgggaactgacgcagatctttagttttgatgtttgctttcgcgtaatcaacggagccagtaccgctcttcacagcaaccactttcccgtcgagatctttcacgcttttcacatcgttattgttagctttcaccatcactaacaggccgcttttgtagtagccgtcagagaaatcgatcgcttttttacgctcgtcggtgatggtaatgcccgccagcgccagatcgacgtttttggtttgcagtgccggaatgatcccactgaaatccatcggcttcagttcgtaatccagcttcagctctttagcgatggcagcccacagatcaacgtcaaagcccacatatttatcgccctgtttaaattcaaacggaacgaaggcggtatccgtcgcgacaactaattttttatccgcggcatgagaagaaaccgcaaaagccagggtcagtgcagccagtgaaacttttaatacagacttcatagcatttccttttttctatccacgggacgatcccctgcgtgacattcacatatatgaaaaaatcgtgccagttttgcaactcattgatttttcaagatgcggcaaaaacgtgatgcacgatttatagggcaataccctgaagatgcaccattctggggcaccaatctggtgcgctaaaattgtgcactcaacacagtgattatttagcgtaaaacctgatgaaaaaacaatctttatgtaacgattgtgtgatgatgtggatacaaaaaatttacttaatcagctggagatagcagatggatgcactaaataagtgcgttgaggtgggctgcaaaacaaaacggcctcctgtcaggaagccgcttttatcgggtactaaagttctgcaccatcagcgatggatttattcgatgttagactcgataaaccacaggaatttatccaggtcgcgagacgcggcggtcaggatatctgcggtgtcgtcatctttcgcttcgccaatcgctttgcgtacgtcattagcgacgattgcgtaacggtcagccagttctttcaggtgatcctgaacgttgtggatgtccagcgggtaacttttcagcggggttttgctgttgataacttgagtggtccccagagctacaccgcccagctgcactgcacgttctgccatggtatccagatgatcgatcagtgcggtgcggaagccatccagcatttcatgtacggcaatgaagttagcgccgcgcatgttccagtgcgcttgtttggtaatcaaagaaagatcaataaactggataacctggcgattcagcaactctactgttgcttttttctcgctgtcggagacatcgttgcgggtataaagcagattggtcgcttttgatttaactaatttagcggtactcataatttcatatcctcttgatgttatgtcccagtaattaacgagactaagtatagcaccggctatgtgttccgctattctggctgttcctatcacactaatagtggtaacaagcgtgaaaaacaaaactaataaagattcaatgagttagatatattgataagaacaattcttatttatctgctcgccaggaattttaggaataaatatgcttttgcataattcgatatataaagacggtgtagaggaaaagtagcgagaaattctgcatggttatgcataaccatgcagaaatgtaaatttaattaatgtctaattcttttattttgctctctttgcgtactgtcagcgtagaacccattgaagcggcgataattgcgccgagcgccagcagctgtatgggtgtcagtgtttctccgaggaaaatcatcccggaaacggcagccagcgccggttccatgctcatcagcgtaccaaatgtccgtgttggcaaacgggtgagggcaatcatttccagcgaataaggcagagcggtcgagagaatagcgaccgccagacccaatggaataaccgaccagtgccagagtgcttcaccagcctgaagcgctccaattggcacgaaaattaacgctgcaatcaacgaaccaattgccaccgtcgcagggccatgttccgctcctgcgcgttgcccacttaaaatgtaaatagcccaacaagccccggcccccagagccagcgcacagccggttaaatcgacatgggaaacgtcttgccccagcggtagcaggaaccacagaccaagaaccgccagcacaacccagacgaaatctaccgggcgacgagaagagaacagcgccaccgccagtggtccggtgaactctagcgccaccgcaatacccagcggtactgtctgaatagaaagataaaaaagataattcatcccacccagcgaaacgccgtaaaacaacagcggtaaccgttgctctttggcaaagcgcagtcgccatggcttaaagaacgcgatgaggatcagcgttcctaatgccagacgcagcgcagtgacacccggtgcgcccaccagaggaaaaagtgacttagctaacgaggctccaccctgaatagacgccatggcaacgagcaatatgactattggtaaccagaccggcattttacgcaatgaaccaggcatcctttctcccacaaatatctagacttaagtaaagcgtggagtgtactggatatacccaatgctggttgagcatttgttgaaaaaattttcccccgttttgactaaaatgcgccaggattgatggaatcattagtctggtgattaggaataatctggatgaatgacagggaaaacatgcgtaatacttacgcagttctctgaaaaagtgatttaaatttagatggatagcggtgtatggaaacgttctgttacatgaaatggcccgttagacatcacaaatcgcgaagagtttcccattaatttttgatatatttaaaacttaggacttatttgaatcacatttgaggtggttatgaaaaaaattgcatgtctttcagcactggccgcagttctggctttcaccgcaggtacttccgtagctgcgacttctaccgtaactggcggttacgcacagagcgacgctcagggccaaatgaacaaaatgggcggtttcaacctgaaataccgctatgaagaagacaacagcccgctgggtgtgatcggttctttcacttacaccgagaaaagccgtactgcaagctctggtgactacaacaaaaaccagtactacggcatcactgctggtccggcttaccgcattaacgactgggcaagcatctacggtgtagtgggtgtgggttatggtaaattccagaccactgaatacccgacctacaaacacgacaccagcgactacggtttctcctacggtgctggtctgcagttcaacccgatggaaaacgttgctctggacttctcttacgagcagagccgtattcgtagcgttgacgtaggcacctggattgccggtgttggttaccgcttctaatcactttggtgatataaaaaatccgcctctcggggcggatttttgtttttaaggtttcgggtcgaaaatatcggttccgagatggttgtaatccaccttctgtaactggaagttggtgatgtatatcggcccggctttcttctcagatataaacgggtatttgatatttatttccttcgctttaattcccgtccactgcgagaaaaagcctaagaagtcattggctgagcggcgggctttaatcacccgatgcgctttatcgtcgctggaaatgaccataaaaggcacctggaaattttgctgatatttatcatcatgggcaaggtattgcacgtctttgccgcgctctttaaaggccagaccgtggtcagaaaagtaaaccagagagaagctgctgccgctgttgcgtaactgatcgtacagcttgcgcagtaaatcgtccgtttgcgtcatggtatagagatagcacgacgtttctttcgattgcacaaaggtttcgtatttgccttgtgtcctgtcgcaggcctgcggatgcgagcccatcagatgcagaacaatcagctgcggttgcgagtgctcttgcgccagcacttgagcggtcatatccagtaacgcttcgtctttcgtgtttttatctgcttcaaaattaccttctttcaggaagtacacttcatctgcacgtttggcgatgctggcgatagcagtatcgtattcgccgatttggccctggttggaaaaccaccaggtctggaagcccgcgcgatttgccagggtgacaaagttatcctgaaactgtggtttgccatcgactacgcgattgagcgttaagccaagcgatttctgcgtggagccactggcggcaatgtagtcagcaaatatcaaaccgttaacgctgctggcaaacggggtattgtcccagtgaccgccaaaggcaccgagggcatcgcgacgcgcgctttcaccgatcaccaccacataggtctgatacttcggcttaacggcagtgaccgtccaggtatctttcattccggaaagttttgccatccgttcttgctcttcaatcacctcgttattattgacgatgacatccttagcaaaacgaaataccggatagccagtatctttcagtttaaatacgccaccccaggccaggttttgcacgggagcaacaaaaaatgtcgccacactgaataccagacacaggctgtcgaaggtattccagcgcgctttttcattctctttttttcgcctgattgctattacgccgagcgcaaaaataaataagccgaccaggtagctgtaccacggaaaaatcgtcaggatttcggtcgactcttccatattggtggagtgcaatgccagcaatgtattgaaattaggcgcgccgtaggcctgagcaaaagggaaataacaagccgccaccagcgaactgacaccgaccagaactttttgtacgcgaggcaatgttcgccatagcaaaagcaaaatagccgtaaacgcagcggtgtagagcaaactgaaggggtaacctaagccgaggttaattaatagcgactgtaaaaagtagaacgcagtccacgggctaaatacccggctacgggtaacaagcgattctttgagggttaaattcatatgccactatcgtaacaaacgccatgtgcttaccctggcgtcaagggtcaatacctgcaagagtgcgtgaagagtggaaaggggtccgcatccgcgagccgcaatatacgcagggctgcaagaagatagagcgagccgccgttcaggtcaactactgacgaacaaatcttttgcgaaggggattgcaaatccgacaaaaagtggggtttttcagaccaaaacgcgttatgcctgcatgaaagcaggagtgaagcggcgtaccgcgacgccgctatttatcggaaggtttatcttgctgcggtttgttgttgaccatatcgcacaacatagagagcagcattaaccgtactttaaagggagaatgactaaacacgcgcatacacctcttgaactcattcataagacctcctgacttgctaatcccgtcgatccttgagggatgattgcattacatacagatatagcacaggctatattatatagctattgctaaaacgttaattttttgtaccttcgcaactctggtttacaatgtgcgcacgaaatgagaacgctatgtatgcgtcaccataatgaggaagcacaatgagtcgtcgcgcaggtacgccaacagcaaaaaaagtgacgcagttagtgaacgtggaagagcacgttgaagggttccgccaggtcagagaggcgcatcggcgcgagcttattgatgattacgttgagctgatttctgacttgatcagggaagtgggggaagctcgtcaggtggacatggctgctcgtctgggagtttcgcaaccgacggtggctaaaatgcttaagcggctggcaaccatggggctgattgaaatgatcccctggcgtggcgtgtttttaacggcagaaggagagaagctggcgcaggaaagccgcgagcgacatcagatagtcgaaaatttcttgttggtgttgggcgtcagtccggaaatcgcccgtcgcgacgcggaaggcatggagcaccatgttagtgaagagacgctcgacgcttttcgtttgtttacccagaaacacggtgccaaatgagcctgccttttttacgcacgctgcaaggcgatcgtttttttcagttattaattcttgttggtatcggattaagctttttcgtgccctttgcaccgaaatcctggcctgctgctatcgactggcacaccatcatcaccttaagcggcctgatgctgctgaccaaaggtgtggagttaagcggttattttgatgtgctggggcgcaaaatggtgcgccgctttgctacggagcgtcggctggcgatgtttatggtgctggcggcggcgctgctttctacctttctgaccaacgatgtcgcgctgtttattgttgttccgctgactatcacgctaaaaagactgtgtgagatcccggttaatcggctgattatttttgaggcgctggcagtcaacgctggttcgctactgacgccaattggcaacccgcaaaatattcttatctggggacgttctggtctttcgtttgccggatttattgcccaaatggcaccgctggctggcgcaatgatgctgacgctcctgctcctgtgctggtgttgtttccctggaaaggcgctgcaataccatacgggggtgcaaacaccggagtggaaaccgcggctggtgtggagttgtctggggctgtatatcgtctttctgacggcgctgggtttcaaacaagagctgtggggactggtgattgtggcggcaggctttgcgctgctggcacgtcgcgtggtgctcagtgtggactggacgctgctgctggtgtttatggcgatgtttatcgacgtccatttactgacccagcttccagcgttgcaaggcgtgttgggtaacgtgagtcatctatctgaacccgggttatggttaacggcaatcggtttatcgcaggtgatcagtaacgtgccgagtaccatattgttgctgaactatgtgccgccgtctttattactggtatgggcggtaaacgtaggtggctttgggttattacccggatcgctggcaaatttgattgcgctacgtatggcgaacgatcgccgcatctggtggcgtttccatctctattcaataccgatgctgttgtgggcggcgttggtgggatatgttttgttagttatactcccggccaactagggtctggcaaataaaaaaggcggattatgagtccgccttttgctttaagttttgaagattaattcagacgaaccggcatcccggagcggtttttaatcgcttcatcaagaacaacctggtcaacatctggctgaccggtcactgtttgcacgctcttcgtcagggtaattggcacaatttcctgaccttcaaactgggcttcggtggtagacagcgggttatggacttcaatataacggctgccgtctggctcgttggtcgcttttaccggctcatcaataaactgtacgcgggtaccgaccggtactttctcgaacaggaatttgatgtcttcgttacgcagacgcacacaaccatgacttacacgcaggccgataccgaagttggcgttggtgccatggatagcgtacaggcgaccgatgtagagtgcatacagccccatcgggttatccggacctgccggaacgacagccggaagcggttcgcccgcagcgcggtactctgcgtgcattttggcggtcggcgtccaggtcgggcctgctttcttacgctcaactttggtggtccagttgataggcgtatctttgcctaactgaccaatgccgatcggcagcacgataacggtgttggtccctttcggatagtaatacagacgcatctctgcactgttaatgacgatgccttcatgaacggtatccggcaggatcagctgctgcggaatgttcagtacagtaccgcctttcggcaggaaggtatccacacccgggttcgcttccatcatattggaaagccccatctggtactccgcggcaaaatactccagcggctgagtgttaccttcaggaatggtgatcacctgattctgaccaaccaggcgactcccgtcggttggcagaggataagttaccgcagaggcggtactgcaaaagccgacaacagcgaaggccgctgcgaataatgttttcaatttcatattcatgttaagcgagattttgtgcctggcaggccattggattgagaatattagagtattggaagcgcattataagttcattccagctcacagtgaaatcagatgtgtacgaaatcacattttttgcctttggcttgagtgtagaccttaagcgaggagcaggatcttctttcagacttatggcataatgcgcggtttgtcatatctcttttcaggatacgcctgtgttagtttccagtaacgtcaccatgcagttcggcagtaagccgttgtttgaaaacatttccgtcaaatttggcggcggcaaccgttacggcctgattggcgcgaacggtagtggtaaatccacctttatgaagatcctcggcggcgacttagagccgactttgggtaacgtttccctcgatcccaacgagcgcattggtaagctgcgtcaggatcagtttgcctttgaagagttcactgtgctggatacggtgatcatggggcataaagagttgtgggaagtgaagcaggagcgtgaccgcatctatgctttgccggaaatgagtgaggaagacggctataaagtggccgatctggaagttaaatacggcgaaatggacggttactctgcggaagctcgcgccggtgaattgttgcttggcgtgggaattccagtggaacagcactacggcccgatgagtgaagttgctcctggctggaagctgcgtgtgcttctggcgcaggcgctgtttgctgatccggatattctcctgctcgacgaaccgaccaacaacctcgacatcgacaccattcgctggctggaacaggtgctgaacgagcgtgacagcaccatgatcatcatctcgcacgaccgtcacttccttaacatggtctgtacgcacatggcggatctggattacggcgagctgcgcgtttatccgggtaactacgatgagtacatgacggcggcgacccaggcgcgtgaacgtctgctggccgataacgccaagaagaaagcgcagattgctgagttgcaatctttcgttagccgctttagcgccaacgcctcgaaatctcgccaggcaacttcgcgcgcgcgccagattgataaaatcaaactggaagaggtgaaagcctccagccgtcagaacccgttcatccgttttgaacaggataagaaactgttccgtaacgcgctggaagtggaaggtctgaccaaagggtttgataacggtccactgtttaaaaatctcaacctgctgctggaggtcggtgaaaaacttgcggtactgggtaccaacggcgtcggtaaatcaacgctgctgaaaacgctggtgggcgatctgcaaccggacagcggcaccgtaaaatggtctgaaaacgcgcgcattggttactacgcccaggaccacgaatatgagtttgaaaatgatctgaccgtgttcgaatggatgagtcagtggaagcaggaaggcgatgacgagcaggcggtacgcagcattctcggtcgtttgctgttcagccaggacgacatcaaaaagccagctaaagtgctttccggtggggaaaaagggcggatgctgtttggtaagttaatgatgcagaagccgaacattctgatcatggacgaaccgaccaaccacctggatatggaatccatcgagtcactgaacatggcgctggaactgtatcagggcacgctgatctttgtttcacacgaccgtgagttcgtaagctccctggcgacccgcattctggaaatcaccccggaacgcgtgatcgactttagcggtaattacgaagattacctgcgtagtaaagggatcgagtaagtgattatccgtcaccccgatactgtcggggtgacggcggctgatgacaaatgcaaaatagcctgatgcgctacgcttatcaggcctacgcagtacctgtaatatattgaatctgcaggactttgtaggccagataaggcgttaacgccgcatcaggcattaagaaagcgcacttgtcagcaatctgagtaacgtcgaatcgattttcttaatcccacatcaattcacttccattaactctcaaacatccatgcccaacgctcgcttaccgtgaatgttgaggtcggcaagcgtaaagcgtccttcccagtttgtttcatagtcctcgcgcgggaagtcgcccggcgatgcgcctttttccagtgcggccttcaccttgtgcgcgtaggcaagatttttctcgcacatcggtgccgcaggaatgtacatcacgttgccccaaccctgttgattttcaacgggggcaacggaatggatgacgtcgcagtgccaccagacggagtctccggcctcgagttttggaatgctggttaacgcctcaattaacagtggatgccattgctctgataccggcaacactcttccgggcgctacgccgcacagttcatcctccggcacatcatcaagcagcggacgtaacagtacgtacgccatggcttcaggaatgggcacaacgtgcagcagcccctgaccaggcagcatatcagagagcgctgtccagccctggaatgtccgaaacacggaacatttggtggtgttgtccaccgtgtactcttcaacttccgtacgatgtgccgcatgccagggatcatattgcgccagattgccattaaagacgttggcgaaaacgcgctgatacgctggaagcagccagcgttccagcgccccggagtcggtatgcgctccaagacctttggaggtcgttccgggcggacggcggcggatacggtcagggtagatgacgctcacatccgggttaaaccattgctttccatcactttcaaatgtccacagacgattgagaaacgactgcgcattcgccatttcttcactctggcgggcctgcatttgcgcctgcgaccagtagatggggtaaatctcgggacgtgaagcgctgagcgtcccgaagaaattatcgccggggcctttgtagacctcgtcaaagcggttgcggtccagatagtccagcatcgactgatcccagcctagcgcttgttcgcgggggaaatggccttttatcaccgcacaaccgcgacgtttaatctgttcgcgctgctctgcagtaacatgacctgctttgatatcggcataagacagcaccggccagacggcatcgccctgtgctttgagtgcgttgatttcagccactcgcgtggcaatgtcatcgcttagctgattaaagatctgctggacgtcgccaagctgcgcccgcagcgcgtgcttcatctgacggatagctgctttgtgatcggcaggcaatgtgtcgctggtaaaagtagaagccataaccacctctcattaactttcattcgaaaccattctgatttgcatgtgacaatataagttataaataagttaatgcaagtttaatgatttgatgtgatgtacaggatgtaaaaagaagggaaaaccggagcgcacggctccggtagagaggtcagctgttaaaaggggatgtgttatccagcaccgcctgaatcacattcagcgcgccttcatgattattatcatcggtagcgtaacgggcgatttgtttaatgttttccgcagcattgcccatcgcaaaggaataacgcgccattttcagcatctccgcatcgttaccgctgtcgccaatcgctaccacattttgcggtgacagatcccagcgtttcagtaaccgcgaaataccgtttgctttatgtagaccgggaataatcaggtcgataaagccaaaaccactggtgacgggtttcataatgccatcgagcgctatgtgcagtttgtcgatcactaacgggatttgttcgtctggcaggttgagcgaaaacttgaacagtacgtcgtcaatctcctgataatcttttacagctttcaggcgatggtagtgttttgccatcagtgcgacaaatgcttcgggggcattttcgctgacatatgcactttgcagaccgcaggcgacaaaattgagttgcttatcttttagcaactcgccaataacaatccgcgattcatgtcgggtcagttcgccgtggaacagttgcttgccatgttcgtaaaccagtgcgccgttttccgcgacaaaagagatctcatcctttagctcaggaaagaacgaaataagctggtaatactgattaccgctggcgacaacgaacttaatgccgcgctttttcagttcctgatattgcgccataaaatgtggttggttgtacgttttggcgtcgttaagaaaagtaccgtccatgtctgtgacgataacttttacgctcataggtgtgctcctggctcgaaaatgaaaccgtaacagtgtaataacaatgtgacgcagagcacaaattatatttcgaatgaaagtaaggatgaaattgatgatgtgaatgatttagcccggcgacgacgccgccgggccgaggagattacagcatatgttcagtacgggcgatgatatcgtcctgtgcgtctggagagagcgcggtgaagaaggcggaatagcccgcgacacgcactaccagatcgcggtactgatccggatgttttttcgcctccagcagcgtttcgcgggaaacgatgttgtactgaatatgccagcctttatgcacttcaaagaaggtgcgcagcaggatcatcagtttctgcttgtcagattcgttctccagcgttgccggattcagtttctggttgagcaacacgccgccgagaatcgctgccgtaggcagtttacccaccgagccaatgaccgcagtagggccgagatggtcagtaccagaggccggactagcgccttctgccagcggggtgtgggctttacgcccgtccggtgttgccatagtttgcgcgccaaacggtacgttagcggagatagacgaggtacccgcgtaatagttgccgccaaccggaccacgaccgtagcgcgggttatggtactgtttcagttcgtcgatataggtctgataagcgcgagccagcagcgtatcgacggtatcatcgtcgttgccgtacttcggcgcaccgttaatcagccgctgacgcagttgctcatgagtcaggccatcgaagtcatccgccagtgcggcagccagctgttgctgaccaatcgcgccctgttcaaataccagtttcttcactgccgccaggctgttgccgaggttggcaatgccaacctgcaggccagaaacccagtcatatttcgcgccgccttgcttgatacttttcgctcgctcaatacagtcatccaccagcgccgagcagagaatatcgtgtacgttctcttccagcatggtgtcgacgacatattcgatttcgattgatttacgcgtgtaataacggatttgcgtatcccacgcgtccattacttcatcgaaattgttaaagttgcctgccgacaacgctttttcttgtggcaggaacactttgccgctggtggcatcacgcccgccttccagcgccgccagcatcacgcgggcgaagttgataaagctcatgccggtacagcgatagccccatttgccaccgacggcggtttcgatacaaccaatcgctgcgtagtcgtaagcgtcctgcggttcaataccgagtttaataaattccgggatcacgatttcgtcgttgttgaacgccggcatcccgaagccgcaacggatcacctgtacgcaggcgtcgaggaaatcattactcattcctgcatggtaacgcacgctgaggttaggctgagtggaacgcaggcgaccgcaggattcgaggatcgcgtaagagaggggattcactgcatccattggttgaccatcaaccagattttgtccgccaatggtaacgttctgatacagcggacttcccgcagaggcttttgagtgtgagccggagcggatcttgttcacttccagcagtttcagccagcagctatgcagcatctcgatggcgtgttcgcgatccagcgtctggttgagttcaacgtcgcggcgatagtacgggtagagatactggtccatacgaccaaacgataccgagtgaccgttagattcgatctgcaaaatcaattggatgaagtaacacagttgcagcgcctgccagaaagtctgcggcggctggtgggcgataagatcgcagttttctgccatcgtcagcagttcatcgcgacggctttcgcgagtttcggtagcagccatttcacacgccagggcagcgaaacgttcaatgtgttcactgactgccaccagcacgatatcaatcgctttcaggaattgttcgccatgtaaatcttccagcaccgtcagattgatgcgcgagcgacgttccgctactttctcacgcagaccatcaagacctttttccagcagcagcgggaaattcaccgccaggtgcgcatcgccggaggtcatattgccttccgctttaatgattccggtcgccagcagacctttttgctcatcggtaaacatgccgtagcagcgatcctgtacggtctgaccgcgccaccacgggcacacttcatgcagaacgcgtttgttctcttcgctcaccgcaaagccagcaccgggacgatctgccagatcatcaatctctttttcgatccacgagacagtatattccgggaagatcggcgcggcgcgaacttcgcttgcctggttgccaatgatcaactcatcgtgtttgatccagatggtgcgattcgccaggtgatgcgccagtgccagcgcgcgacgtaccgggatcggcttatcgagatgttgttgatacatctcggtatagtgctgcgcgcgctcggtacagactggcggtttcacaatatgcaccagcgcatttttgtgcgctttaatgcggtcgctgagcgtgtccagtttcagtgtggtcatggttgttatcctcgtaaggtcgcggttaaccctttctggcaggcatactgctgggcaaagtcgagcagttctggcgcatcaagcggtttttccggggcgtcatagggcagattaagtaagtgatatttgttgatgcccagcgtgtggtagggcagaaaatgaatttcgccaacgtgcagctcgtcggcggcaaaatcggtaatggcttttacagaggtttcgtcggcattaaagccctgaatcagcggcacgcggataatgatttttttgcccgctgcggcgagttttttcaggttatccagcactctggcggcgttaccgtcggtccactgtttaaacggcgcgtcggcaacgtgttttaaatcggcaagaaacagatcgatatagggcagagaaggggcgatatatttccacggcacatgcagacaggtttctaccgcagtatgaatgcctgcctcgtggctggcttgcagtagcgccatcgccatttccggctgcataaagggctcaccacccgaaagcgttaaaccgccgccgctgcgatcgtaaaacggtttatcgcgcagaacggtcgtcatgatctcctcaacgcttttcacttcaccacacacggttaatgcctgtgtcggacagcagtcggttaacgccgtcagatgctccggggttaacttttcccgatgaataagcaaaccattcagcgcgcgctcaatcacttccggcgcggccttagcgcacagctcgcagccttccagacacagtcgtgcgtcatacagcagatcctgcgtgcgggcgcggctttccgggttctgacaccagcggcagcccagcgaacagcctttaagaaatacgaccgtgcggataccggggccatcatgggtcgagtagcgctgaatattgaaaatcatagttgcctctctgtttcgttcaaacattaaaatactttcgaatgaaagttagattgatgtgcgtcaactgttcagagagttttcccgtgatagtctacattcagacaaaaagtacattttgaggatggttatggaactgtatctggatacttcagacgttgttgcggtgaaggcgctgtcacgtatttttccgctggcgggtgtgaccactaacccaagcattatcgccgcgggtaaaaaaccgctggatgttgtgcttccgcaacttcatgaagcgatgggcggtcaggggcgtctgtttgcccaggtaatggctaccactgctgaagggatggtgaatgacgcacgtaaattgcgttctattattgcggatatcgtggtgaaagttccggtgaccgccgaggggctggcagctattaagatgttaaaagcggaagggattccaacgctgggaaccgcggtatatggcgcagcacaagggctgctgtcggcgctggcaggtgcggaatatgttgcgccttacgttaatcgtattgatgctcagggcggtagcggcattcagactgtgaccgacttacaccagttattgaaaatgcatgcgccgcaggcgaaagtgctggcagcgagtttcaaaaccccgcgtcaggcgctggactgcttactggcaggatgtgaatcaattacgctgccactggatgtggcacaacagatgattagctatccggcggtggaagccgctgtggcgaagtttgaacaggactggctgggagcgtttggcagaacgtcgatttaaccggacgttctgcatcctcataaattgctgatgacgtggcggagtgccgcgtcttatctggcctggaggtggcaattactgcccgcacacctcacaccccggattgcgcatcagtttcatttcgcgaaactgacaggtcatcgcatcgtacatgacgattttcccgctggccggtttgccataacctgccagcagtttgatcgcttccattgcctgcaacgaaccaattacgccgatcaacggtgccatcacgcctgcttctacgcaggttaatgcgttctcgccaaacaaacggctaaggcagcgatagcacggttcgccgtcctgataagtgaagaccgtgatttgcccttccatacgaattgccgcgccggaaaccagcggcaccttcgcggcaaaacagccagcgttcagttgattacgcaccgcaacgttatccgtacagtcgagtaccagatcgtgttttgcaatcatcgcagcaagttcagcgtcatcaagcagtgcattgactggcgtaatcgcgatatgtgggttgatccgcgtcatggcgtcacgggcggattctaccttcggttgcccgaccgtagcatcactgtgcagcgtctggcgttgcagattcgagagcgaaaccgtgtcgaagtcgagcagcgtcaggttgccgacaccggcgcttgccagatactgcgaagctgcgcagccgagtccaccgaggccgactaccagcacacgagaatcttttagcgcctcctgaccgtcaaaatcaaaaccgcgcagaatgatttgccggttgtagcgcagcatctcctgatcgctgagttccgccattacaggcctccgaacaacgcgttaaacggttctacttccacccattcgcccacgtccacattgccgcgatcgcgttccagcacgataaagcagttgccgagactaaaggagctaaatatatgtgaaccctgatgtccggtggtcgtcacttcaagttcaccgtcggcgttgcgttgcagcacgccgcgctggaaatcaagacgtcctggcgtttttttcaggcgggacgctgtgcgtacgcgctggcgcgcgggcaggccgctggcggtgttgccgcttagttttgccagcaaaggctgtaccagttgatagaaggtcagcgtcgctgaaaccgggttgcccggcaggccgcagaaccagctattgctgagtttaccgaacgcgaacggtttacctggtttaatcgccagcttccagaaggcgatctcccccagctcttcaagaatcgttttggtgtaatccgcttcacccactgaaacaccgccggaactgatcaccacatccgcctggctgtcggcttcaataaatgcggcgcgcagggcatgtggatcgtcgcggataatccctaagttgattacctcgcatcccaactgttctaacatcaggtgtacggcgagacggttggtatcgtagatttggccatcgcccagtggctgaccgggcaactggagttcatcaccggtagaaaaaagcgctacacgcactttacgaatcaccggaacttcggcaatccccagtgaagcaatcactggcagttcagcggtagtcaggcgagttcccgccgggaaaacaaccgcacctgcagagatatcttcaccgcgacggcgaatattttgcccgctacgcacttcagcagtaaaacgcacgccattgtccgtttgttcagtctgctcctgcatcaccaccgcttcgcagccttccggcaccggcgcaccggtcataatacgaatgcaggtacccgcaggccattcaccatggtacggctgaccggcaaaggatttaccggcaacgggcagcggttgcctggaggcaatatcggctaaacgtaccgcgtagccgtccattgcggagttatcaaaccccggaacatcaagcggcgaaacgacatcgctcgccagaatacgaccaaaacactgtaccagtggcagcgtttcctgggcggtcagtggggtgacgcgagaaagcatctcattaagcgcggtgtcgagcgacatcaatccggtggtaaattccatgaaaacactcctgcggaggcaaaatcgaatttgcctattatgtcagaaaaacgccacagactgtatgccacctcgggcgtagcgttggctcctgcctttacatgccatatccatctttctatat

SEQ ID NO: 236 - DNA, 21078 bp, Escherichia coli
  source 1..21078: mol_type = genomic DNA
ttcctgtccgtttccttcgtgatttttcctgatggtaaactatcataaattcttttcattttctgaatcaaacctatcactttttcatgatcatccatcttgaaaagagagagggctttattgtcaattaacgtgtttttatgatgtttgctgtaattatatgattttgttttctttgtatgtgatgaacttgtgaaagagtggttatcgttaatctggcaaagagagaaaaacatattatttaaaccattatagcgcataaaatatccttataattaacaagaaagaaaaggcatattctctgcattatcattttctacgactgtcaaaaatcgctcattttttaatgagtttatttgtttaatattatgggaaaaggtgatgcatgctggagaggaagagtattccccggtcaggcgaccggggaaggggagagattaatgtgcgcggccttgctcaacgccaaagccggtctgggagcggataaactgtgcacggaacagttcacgctcgcgcgcaccttccgctgagttatcggttgccgagaagaaccagatgccgaggaatgccacgctgatagagaacagcgccgggtattcatacgggaagatggctttttcgtgaccaagggtctgtacccaaatcgtcgggccgaggatcatcagtaccactgcggtaatcagccccagccagccacccatcatcgcgccacgagtggtcagtttcgaccagtacatagaaagcagaatgatcgggaagttacagctcgctgcgatggcaaacgccaggcctaccatgaaggcgatgttctgattctcaaacagcacgccgaggataatggcaatcacacctaaaatcagcacggtgattttcgatacccgcagttcttcacgttcggtcgcgccttttttgaagacgttagcgtacaggtcatgcgaaaccgctgatgcgcccnnnnnnnnnnagcgtcagaccagcaaccaccgcaagaatggtggcaaaagcaaccgctgaaataaaaccgaggaacaggttgccgcccactgcattcgccaggtgaacggccgccatgttgttaccaccaatcagatggcccgccgcgtctttatattccggattcgcaccaaccagcatgatcgcgccgaagccgataataaaggtcagaatatagaagtagcccataaatccggtagcgtagaacacgctcttacgcgcttcgcgggcatcgctgaccgtaaagaagcgcatcagaatgtgcggcaagccagccgtaccaaacatcagtcccagacccagagagagcgcggagatcggatctttcaccagtccgcccggtttcatgatgtcgacacctttcgggtgtaccgccatcgcttcgctgaacagattgttgaagctaaagccgacgtgtttcatcaccataaaggccataaagctggcaccgaacagcaacagcacggctttgataatttgtacccaggtggtcgccagcatgccgccgaacaggacgtacatcatcatcagcacgccgaccagcaccaccgcaatgtgatagttaaggccaaacagcagctcgatcagtttacctgcacccaccatctgggcgataaggtaaagcgccaccaccaccagagaaccacaggccgaaagaatacgaatcggcccttgtttcagacggtaagaggccacatcggcaaaggtgtagcgccccaggttacgcagacgttcggcaatcaggaacagaatgatcggccagcccaccaggaagcccagcgagtaaattaagccgtcatagccggaggtaaacaccagcgcggagatccccaaaaatgaggcggcggacatatagtcaccggcaatcgccagcccgttctggaagccagtgatattgccgcctgcggtgtagtagtcgctacgagaacgtacgcgttttgatgcccagtaggtaatgccgagcgtaaacacgacgaaaatcaggaacataataatcgcctgccagttcgttggctggcgctctacggcccagctaatagcatccgcggcgttagctgcgaaagggagtgtggcggcaagcgccgtcagaactcttttcatgatgcttgtacctcatgcaggacttcgttattaagacggtcgaattcgccgttcgcccgccagatgtagataccggtgagaacaaaggagatcacaatcactccaacaccaatcggaataccgcgtgtgacgctggtgttcggattcagcggcgtgcccagccagccgggcgcgaaggcgatcagtaaaataaagccgatataaactgccagcataataatcgacaggatggtggcaaaccgttgccgtttttcgactaactccctgaaatgcgcattgtcttctatccgctgataaatagtgccattcatcacagattctccagaggtaatgtagggattgttttaattcccgctcccttatgggagaaggttaacgctcgggtaacccttgccgaatgtaggccggataaggcgttatatgccgcatccggcaatcaatgcctgatgcgacgctgtcgcgtcttatcaggcctacaaaccgttaccgattcgcatccggcaattgtgggttacgatggcatcgcgatagcctgcttctcttcaagcagcttctcgacaacgccaggatcggcaagcgtcgaggtatcgcccaggttgctggtatcgcccgccgcaattttgcgcagaatacggcgcataattttgccggaacgggttttaggcagggagtcggtccagtgcagcacgtctggcgtcgccagcgggccaatctctttacgcacccagttgcggacttctgcgtacagttctggtgacggttcctccccgtgattaagcgtgacgtaggcgtagatcgcctgacctttaatattgtgcggaatacctactacggcggcttcggcaatcttcggatgcgccaccagcgccgactcaatctctgccgtccccagacggtgaccggagacgttcagcacgtcgtccacacgcccggtgatccagtaatagccatcttcatcgcgacgcgcgccgtcgccgctgaaatacatatttttgaaggtggagaagtaggtctgttcaaaacgttcgtgatcgccaaacagcgtacgcgcctgacccggccaggagtcggtgatcaccaggctgccttcggtagcgccttccagcgggttaccttcgttatcgaccagcgccggttgcacgccgaagaacggacgtgttgccgaaccggctttcagctcggtagcgccaggcagcggcgtgatcatgaaaccgccagtttcggtctgccaccaggtatcgaccaccggacatttctcgttgccgatttttttccagtaccactcccacgcttctgggttaattggctcgcccacggaaccgagaatgcgcagcgacgaacggtcggtaccctcgatcgctttatcgccttccgccatcagcgcgcggatcgccgtgggtgcggtatagagaatattgacctgatgcttgtccaccacctgcgccatacgggcaggcgtcggccagttgggtacgccttcaaacatcagcgtggtcgcaccgcaggccagcgggccgtacagcaagtaactgtgtccggtcacccagcccacatcggcggtgcaccagtagatatcacccggatgataatcaaagacatatttaaaggtcagcgccgcgtacaccagataaccgccggtagtatgcagcacaccttttggcttaccggtagaaccggaggtgtagagaataaacagcggatcttcggcgttcatctcttccgcctggtgctgatcgctcgcttgctcaaccaggtcgtgccaccacaggtcgcgcccttcctgccagtcaattttcccgccagtacgcttcagtaccaccacatgctctacgctggtgacgttcgggtttttcagcgcgtcatcaacgtttttcttcagcggaatactgcgcccggcacgcacaccttcgtcggaagtgatcaccagtcgtgagttggaatcaataatgcgcccggcaacggcttccggcgagaagccgccgaaaatcaccgaatgcaccgcgccaatgcgggcgcaggccagcatcgcaaccgcggcttccggcaccatcggcatataaatcgccaccacatcaccttttttaatgcccagctcgagcagggtattggcgaagcggcagacgtcgcggtgcagctctttatagctgatatgtttgctctggctggcgtcgtcgccttcccagatgatggcggtgcgatcgccgttttcttgcagatggcggtcaaggcagtttgccgccagattcagcgtgccgtcctcgtaccatttaatggacacattaccgggggcaaaggaggtatttttcaccttctggtacggtttgatccagtcgagaatttttccctgttcgccccagaaggtatcaggtacgttaatagattgttgatacatcgcctcgtactgctgagggtttatcaggcaacggtctgcgatgttggcaggaatggtgtgtttgtgaatttggctcatgcttttgttctccttgtaggatgttaataatatgtggcataagcgttaaatgtaggggtattggcagttttgtttagtatttgggcgacagatcacgcaaaagtagaattgtgcaaataaacggcagggtaatttttgaaggtcaccaacaaaagttgattaattctttgaggaacatgcagttatgcatgctgttgaaaaagaggaagatactgactaactctaaagtggtattttacatgcacttacaattgattaaagacaacattcacagtgtggttatttgttacacataggggcgagcaatgtcatgacagtgtaggtgcggttactgtcgtgaaaacaataaaaaccgccattgcaacaatggcgcaattcggatgaagcccctatgacaaggataaaaataaacgcacgccgtatcttcagcttattgattccttttttctttttcacttctgttcacgctgaacaaacggcagctcccgcaaaacctgtaactgtggaagcgaagaatgaaacctttgccccgcagcatcccgatcaatatctctcctggaaagccacctcggaacagtcagagcgtgttgacgccctggcggaagatccacggctggtgatcctgtgggcggggtatcccttctcgcgcgattacaacaagccgcgtggacatgcctttgctgtgaccgatgtgcgtgaaaccctgcgtaccggtgcgccgaaaaacgctgaagatggtccgctaccgatggcgtgctggagttgtaaaagcccggatgtggcgcgtctgatccagaaagacggcgaagatggatacttccacggtaagtgggcgcgcggcggcccggaaatcgtcaacaacttaggttgtgccgactgccataacaccgcctcaccagagttcgccaaaggcaaaccggagttaaccctttcccgtccgtatgcggctcgcgcgatggaagccattggtaaaccttttgagaaagccggacgtttcgaccagcaatcgatggtttgcggtcagtgccatgtggagtattacttcgacggcaaaaacaaagcggttaaattcccgtgggatgacggcatgaaagtcgaaaatatggagcagtattacgacaaaattgccttctctgactggactaactccctgtcgaaaacgccaatgctgaaagcgcagcacccggaatatgaaacctggacagcgggcattcacggtaaaaacaacgtgacctgtatcgactgccatatgccaaaagtgcagaacgccgaaggcaaactctacaccgaccataaaattggtaatccgtttgataacttcgcccagacttgtgcgaactgccatacccaggacaaagctgccttgcaaaaagtggtcgcggaacgtaagcagtcgattaacgacctgaaaatcaaggttgaagatcaactggttcacgctcacttcgaagcgaaagcagcgctggatgcaggcgcgacggaagccgaaatgaagccaattcaggacgatatccgtcatgcccagtggcgctgggatctggcgatcgcttcccacggcattcatatgcacgcaccggaagaaggtttacggatgctcggtacggcgatggataaagcggcggatgcacgcaccaaactggcgcgcctgctggcgaccaaaggcatcacccatgaaatccagatcccggatatctcaaccaaagagaaagcccagcaggccattggcctgaacatggaacaaatcaaggccgagaagcaggacttcatcaaaacggtgatcccgcagtgggaagaacaggcacgtaaaaacggtctgttaagccaataaccccgttccgcctcgcaaggggcggaaaacacaatggagtgaatatgagcgtattacgttcgttattaactgccggggtgctggcgtcgggcctgttgtggagcctgaacggaattaccgctacccctgcggcgcaggcatctgatgatcgctacgaagttacccagcagcgtaacccggatgccgcctgtctggactgtcataagccagataccgaaggtatgcatggaaaacatgcttccgttatcaacccgaataacaaactgccggtcacctgcaccaactgtcacggccagccatcaccgcaacaccgcgaaggggtgaaagatgtgatgcgctttaacgagccgatgtacaaggttggagagcagaacagcgtctgtatgtcctgtcatctgccggaacagttgcaaaaagcgttctggccgcacgatgtccacgtaaccaaagtggcgtgcgccagctgccattccctgcatccacagcaagatacgatgcagacgttaagtgacaaaggacggattaagatttgcgtcgattgccacagcgatcagcgcaccaatccgaactttaacccggcgtctgttccgttgcttaaggagcagccatgacctggtctcgtcgccagtttctcaccggcgtcggcgtgctggcagccgtcagcggcaccgcagggcgcgtggtggcgaaaacgttgaatatcaatggggtgcgttacggcatggtgcatgacgagtcgttatgcatcggctgtaccgcctgtatggatgcttgtcgggaagtgaacaaggtgccggaaggcgtctcgcgcctgacgattattcgtagcgagccgcagggcgaatttcctgatgtgaaatatcgcttcttccgtaagtcttgccagcactgcgatcatgcgccgtgcgttgacgtctgcccgaccggtgcgtcttttcgtgatgccgctagcgggattgtcgatgttaatcctgatctctgcgtcggttgtcagtactgcatcgccgcctgtccgtaccgcgtgcgctttatccatccggtcacgaagacggcggacaaatgcgatttctgccgtaaaaccaatttgcaggccggtaagctgcccgcgtgcgttgaggcttgcccgacgaaggcgctgacgtttggcaatctggacgatcctaacagtgagatttcgcaactgctgcgccagaagcctacttaccgctacaagctggcgctgggaaccaaaccgaagctgtaccgcgtaccgtttaaatacggggaggtgagccaatgacgcagacttccgcatttcattttgaatcgctggtgtgggactggccgattgccatctacctgtttttgattggtatttctgccggtctggtgacgctggccgtgctgttacgtcgcttctacccgcaggcgggcggtgcagacagtacgttgctgcgcaccacgctgattgtcgggccgggcgcggtgatcctcggtctgttgatcctcgtcttccacctgacaagaccgtggaccttctggaagctgatgttccactacagttttacctcggtgatgtcgatgggggtgatgctgtttcagctctacatggtggtgctggtgctgtggctggcgaaaatctttgaacatgatttgcttgccctgcaacaacgctggttgccgaagctggggatcgtgcaaaaggttctgagcctgctgacgcccgttcatcgcggactggaaacattgatgctggtgttggcggtgttgttgggggcttataccggctttctgctgtcggcgctgaaatcgtatccgttcctcaataacccgatcctgccggtgctgttcctcttctccggcatctcgtccggtgcggcggtggcgctgatcgccatggcgatacgccaacgcagtaacccgcattccacggaagcgcagtttgtacaccgtatggaaatccccgtggtatggggtgaaatcttcctgctggtggcgttttttgtcggtctggcgctgggcgatgacggtaaagtgcgtgcgctggtggcggcattaggtggcggtttctggacgtggtggttctggcttggtgtcgccgggctggggctgattgtgccaatgttgctcaaaccgtgggtcaatcgcagttccggcattcctaccgtgctggcggcgtgtggggccagtctggtcggcgtgttgatgctgcgctttttcattctctacgccgggcagttaacggtggcgtaagccagaaaagaggtggtttctggacgtattccttcctgaagtcggttttctggcgttgttgttaagtctcggggtcaacgtgttgaccccgttgacggcctttgcgggagtgcggttgcgctggcctgccatgatgcgactcacttgcatcggcattctggcgcagttcgcgctcctgctgctcgcctttggcgtactgacgtattgttttctcatcagcgatttctcggtcatttatgtcgcccaacatagctacagcctgctgtcgtgggaactcaaactggcggcggtgtggggcggccatgaaggttcgctgctgctttgggtgctgctgctttccgcctggagcgcgctgtttgcctggcattatcggcagcaaaccgatccgctatttccgctgacgctagccgttttatctctcatgctcgccgcactgctactgtttgtagtgctgtggtccgatcccttcgtgcggatatttccaccagcaatcgaaggccgcgatctcaatccgatgctgcaacatcccggtcttatctttcatccaccgctgctttaccttggctatggcggtttgatggtggcggcgagcgtggcgctggcgagtttactgcgcggcgagtttgatggtgcctgcgccagaatttgttggcgctgggcactacctggctggagcgcattaacggcggggatcatcctcggttcctggtgggcctattgcgaactgggctggggcggctggtggttctgggatccggtggaaaacgcctctttattaccctggctttctgccactgcgctgctgcacagtttgtccctgacacgccagcgggagattttccgccactggtcgctgttgctggcgatagtaactctgatgctgtcgctactgggtaccttaattgtccgttctggcattctggtttcggttcatgcgttcgcactggataacgtccgcgccgtgccgttgttcagcctgtttgcactgattagccttgcgtctctggctctgtatggctggcgagcgcgggacggtggtgcggtggtgcgtttttcggggttatcgcgggaaatgttaatcctcgctacgctgttgctgttttgcgcagtgctactgatcgtgctggtgggaacgctttatccgatgatttacggtctgctgggctggggacgcctctccgttggcgcgccgtattttaaccgcgcgacgttaccgtttggcctgttgatgctggtggtgattgtgctggcgacgtttgtctctggcaaacgcgtgcagcttccggcgctggtagctcatgcgggcgtgctgttatttgccgcggggatcgtggtttccagcgtcagccgtcaggagatcagcctgaatttacagccgggtcagcaggtgacgctggcaggatacaccttccgttttgagcgcctcgatctgcaagccaaaggcaattacaccagcgaaaaagcgatagtggcactgtttgaccatcagcaacgcattggtgaactgatgccggagcggcgtttttacgaagcacgtcgtcagcaaatgatggaaccgtcaattcgctggaacggcatccatgactggtatgcggtcatgggtgaaaaaaccggagcggatcgttacgcttttcgtttgtatgtacaaagcggtgtgcgctggatctgggggggaggattgttgatgattgcgggcgcattgttaagcggatggcgggggaagaagcgcgatgaataaagggcttctcacgctactgctgttatttacctgttttgcgcgcgctcaggtcgtagacacctggcaattcgccaatccacaacaacagcaacaggcgttaaatattgccagccagttacgttgtccgcagtgccagaatcaaaacttactggaatccaacgcgccggtggcagtcagtatgcgccatcaggtttacagcatggtggcggaggggaagaacgaagtcgaaatcattggctggatgaccgaacgctacggagattttgttcgctataacccaccgttaacgggtcagacgctggtgttgtgggcgctgccagtggtgttgttactgctgatggcactgatcctctggcgagtgagggcgaagcgatgaaacagcccaaaataccggtgaaaatgctgacaacactcacgatattgatggtatttctctgtgtcggcagttatctgttaagcccaaaatggcaggcggtacgtgcggagtatcagcgtcagcgcgatccgctacatcagtttgccagcaagcaaaccccggaagcgcagcttcaggcattacaggataaaatccgcgctaatccacaaaacagcgaacagtgggcgttactgggcgagtattatctgtggcaaaacgattacagcaattcgctgctggcgtatcgtcaggcgttgcaactacgtggtgagaacgctgaactgtatgcggcgctggcgacggtgctttattaccaggccagccagcatatgaccgcccagactcgcgcaatgatcgataaagccctcgcgctggactctaacgaaatcaccgctctgatgctgctggcttccgatgcgtttatgcaggcgaattacgcgcaagccatcgaactatggcaaaaagtgatggatctcaactcaccccggatcaaccggacacagctggtcgagtcgattaatatggcgaaattgttgcagcggagatcagattaatcatctggtgatgaagattatgttattgagttgtataaaaaataatcgaatgaacatatgccaaaaataatcaccaatcagtattattgcagattaaacaaataaaaatctttccataacaaatggttattcattaatcctgccataaactcgcgttattatgcattaatgcagcgaaaagctctgttgttaaagggttgcgcaacataccgcgcaaatgatactgatcataagcgttaaaaaaatctacaaaccaacgcaacacaattcatgccctggcagtatgtcacgttctcgcgtttctgaacggggaacggcgctccattgaggaagttattctgatgaaaagtataaaattcagcctggcctggcagattctgtttgctatggtgctgggcattctcctgggaagctacctgcactaccatagcgacagccgcgactggctggtcgtcaatttgctctctccggcgggtgatatcttcatccatctgatcaaaatgattgttgtgccgattgtgatctccacgctggtggtgggtatcgcgggtgttggtgatgccaaacagctcgggcgtattggcgcgaaaaccattatttacttcgaggtgatcaccaccgtcgccatcattttggggatcactctggcgaacgtcttccagcccggtgccggggtggatatgtcgcagctggcgaccgtcgatatctcgaaatatcagagcactacggaagcggtacaaagcagttcccacggcattatgggcacgattttgtcgctggtgccgacgaacattgtggcgtcgatggcgaaaggcgaaatgctgccgatcatcttcttctcggtgctgtttggtctggggctttcctccctgcccgcgacgcatcgtgaaccgctggtgaccgtgttccgctccatctctgaaaccatgtttaaagtgactcacatggtgatgcgttatgcaccggtgggtgtgtttgcgctgattgcggtgacggtggctaactttggtttctcttctctgtggccactggcgaaactggtgctgctggtgcatttcgccattctgttcttcgcgctggtagtgctgggaattgtggcgcgcctgtgcgggttaagcgtctggatcctgattcgtattctgaaagatgagctgattctggcgtactccactgccagctctgaaagcgtactgccgcgaattattgagaagatggaagcctacggagcaccggcgtcgatcaccagcttcgtggtgccgaccggttactcttttaaccttgatggttcgacgctgtatcaaagtattgccgctattttcatcgctcagctgtatggcattgacctgtccatctggcaggaaatcattctggtgctgacgctgatggtgacctcgaaagggattgctggcgtgccgggcgtgtcgtttgtggtgctgctggcaacgctgggtagcgtaggtattccgctggaaggcctggcgtttattgctggtgttgaccgtatcctcgacatggcgcgtactgcgctgaacgtggtgggtaatgcgctggcggtgctggtgattgccaagtgggaacacaaatttgaccgcaaaaaggcgctggcttatgagcgtgaagtgctgggcaaatttgataaaactgcggatcaataattgaagattgccggggttatccacccggcaatgtgtggatgcctgatgcgacgctggtgcgtcttatcaggcctaccttaaccgttggttaatttttcaaactcttcacacccggtatcaaacccttccatacagctcaggttcaaccagtgcagcgccttttgtttgttcttctcgataaaaccttcctcaccgtttaagaacatcattcccgcccagtactcggaataaccggttcgggaaattgcagagctgcgtttgaaataccaggttgccttgtcatcgtcggccttaatgcccacgccgttggcgtaaatcaaaccaagcagcatttgggcatcgacggcggagtcattctccagatcttccgaggcgttttctaacagcgaaatcgcctttggataatccggtttacccgcttgagtatttaccagaatatgcgccagcgttacttcaccttctttactgcccgcttgcgccgctttctctgcaagaacttttgcttgtggatagtccagactgaccggattggtgattttgatctgcgccagcagcgcgcaggcatcagcatcaccgctgtcggcggctttctgtgcccaatattcggctttgctcaaatcgccggagctaaaccagctgtcggcaagaaaatattgtgcgcgtcggtccccggcctctgctgcctttaaatactggctgccaggctcggagtcgttcgcgtgggcaaagaatgtcaaaaacaacatcaatgcgataatttttttcattttgataatacgattgggtagggagtaaccagtataaagagttcgaatggataaaaaaacagcctccgaaaggaggctgtagaaaggactgtattacgccagtgccgcttcgcgcaggcgagttttcaacttgttgtactcgtcaatcacgtactgctcggcggcgcgctgatcggcgatcggctcgacgcgcacggcgcagtatttgtattccggcgttttcgtaatcgggcttaagttttcggtaaccagctcgttacaggcaccaatccaccactggtaggtcatgtaaatcgcccctttgttcggacgatcgctgacctgcgcacgggtgataattttgcctttacgcgagtgcacccaaaccaatgcctcatcttcaatacccagacgtttggcgtcttcggtattgatttgtgcgtagccaggttcatcagccagcgccgccagtgccgcacagttaccggtcatcgaacggcaagagtagtgaccaacttcacgcaccgttgacagtaccatcgggtactcgtcggtgagtttgtcgattggcgctacccagtcgcaggtgaagaactgtgccagaccgttcggggtatcaaacttctctttaaacagataagaagtcccctgatcggcatctgaagtatcgcggcaaggccactgaatgaagcccagttcgcccattttctcgtaagtcgcaccgtagaaatccgggcacagatgacgcaactcatcccagatctcctgggtgttgttgtagtgcatcggataacccatacgggtggcgatttcactgatgatttgccagtccgttttcagatcccatttcggttcaactgctttgaagaaacgctggaagccacggtcagccgcagtaaacacgccttcatgctcgccccacgacgttgacggcaaaatgacatccgccgccgacgcggttttggtcataaagatgtcctgaacgataaccagttccagatcttcaaaggctttacgtactgccgacagctccgcgtcagtttgcagcggatcttcgcccataatgtacgcggcacgcacttcgccatgcgctgcgcggtgcggcagctcgctgatgcgataaccggtatgagcaggcaggctttccacgccccaggctttggcgaatttctcgcggttagccggatctttcacgtactggtatcccggatacgtatccggcagcgcgcccatatcgcaggcaccctgcacgttgttctgaccacgaaccgggtttacacccgcatgcggcttaccgaggttaccggtcagcatcgcgaggctggtcagagaacgcacggtttccacgccctggtagaactgggttacacccatgccccacaggatggcggcgcttttcgcctgggcatacatccgtgccgcctgacgaatctcactggcgctgacgccggtgatatcttcaaccgactccggcgtgtagccttcaacgattttacgatactcttcaaagccttctgtacgggaagcgacgaacgctttgtcgtacagattttcttcaataatgacatggcccatcgcattcaacagcgcgatgttcgagccgtttttcagtgcaatgtgcatgtcagcaatgcgcgcggtttcaattttgcgcggatcgcagacgataattttcgccccgttacgtttagcgttaattacgtgattcgccacgattgggtgggaatccgccgggttgtacccgaaaacgaacactaaatcggtattatcaatttcgttaatagcattgctcattgcgccattaccgaccgattggtgcagacctgcaaccgatgggccgtgtcagacacgagcgcagcagtcaacgttattggtaccaataacggcgcgcgcaaatttttgcattacatagttggtttcgttacccgtaccacgcgaggagccggtcgtctggatggcatccggaccgtacttccctttgatggcgctcaggcgctcggcaacgtaattcagtgcctcatcccaggaaacaggttcgagtttgccgccacgctggcgacggatcatgggggttttcaggcgcggggtcaggatctgggtatcgttaatgaaatcccagccataataacccttcagacacagggtaccctggttggttttcccctgcgctgcctccgcccggacgattttgccgttatcgacgaccaggttgattttgcaacctgatgcgcaataggggcaaaccgtgacgacttttttcatcggtctcgctccagttaatcaaatcacgcatacgcgctctcgactacagtatgcatcttttatgccacattttatttggggtcattccctgatgttacgggcactatttattcaaaactctgacgaaaaacaggctgtcgtcagttttgacgtgacgaaacgaaataccgcgtgacagccatcacgcggcagacattttattttttctcgacgacgggagccgcctgatacccgccgcccagcgatttcatcaactgaatgctttggatcacccggcggctgtccagcatcagtaatgacatctcttcggcaagtactggcaaccgggcttcagtggcctgtaagcggctggttaagccgcgctgataggcggcctcggcagcgcgctgggtgaagcgcgttgcttccacgcgttcagcctgcatttctcgctcgtcgttgagcgtttgcagacgcgtgccgttgacggcaacgtcacgcaccgcgttcagtactgactggttgtaacgttcaatcatcatgttgctggcggcgcgcgtgccttcgagattggcattcaaccgtccaccgtcaaacagcggcaatttcagacccgggatgaagttgaactggcgactggtttttttgaataaggtatccaggtggatggcatcaaggccgaaaaacgctttgatatcaaagctcgggtagaacagcgcccgcgcggaatccacctgatctaatgacgcctgaacataccagcgcatggcttgcagatccgggcgtctggcgagcaactcataagagagtgtcgccggaatgccggtctggactcgtggtaatgccaccggtttgatctccggcatatcgctggcccccgcgccaatcaatgcacgcagagattctcgcgtttcggtgatttgccctttgacggcagcaatttgtttatcgaccgccagaatctgtgcccgcgcgccgtggaaaggcacttgtgcttccagaccgtgcgccactttactctggtgcgctttcaccgcgtaatcaatcacatcgcgagtttgttctaacagatcgagcatctgatagctggcctgcatactgtaataaagctgcgctacgcccgtggtcagcgatagctctactgctgcggtttctgccagcgcggcattatgcgcgccaatggcggcggcaaccgctgagcgatgcacaccccacaaatcaagatccagtccggcaaacaaacctactgtggcttccgtatagtacggcccgtccatacccagtgcgggcgcatccatcgcataagggcttaaaaagccgttcgccgagacgcgttggcggttgagcatccctaacgctgcgacctgtaattgtgaaccggcatctaacaaatcggcctgggactgcgctttttcttcccgcagtttcgcttcggcgagggtgtgtgaaccacttagcgtccgttggatcagcgcatccagctgcgggtcattgagttgtttccaccactgcgcctgcggccagccggagctggcaagatgaatatcgtcggccagtttgatttgttccggtttgagctgttgatgaggtgcagaatccttacgtaccagggcacagccggaaatcagcgtcgtgctgccgagaatgctgcacaacagcagacgtgaaagttgacgattgatcattgcgtggctccttgtgcctgttccgtggcgggcgttaatgccggggctgtccagtctggcaagcgggcgaaaagctggcagacgtgttgctcctgttttaataaggtgggcaggatggcctgcgaggcgggtgtctcttcaagcgttatttgaggagaacggctgagtgcggttgccagaccggcagcgtatttctccagggcgtcggcaaactgagctgctctgtccggctgtagtgcgttatccagcgcctgcgccgagttccaggtggcatcccaggcgtgaagaatatcgcggccctgacgaataaccgtttgcgaacgttcaatcagtaaggcgcgttcttcgctgtccagttgacgctccagcgccacgcgttggcacatctcttcacaggcattaaacgccgcatgcagaccgatacgaatttgcagataagtgcgcagagccgtgacttcctgctggcgtgggatccgcattactttacttaacatacccagcgtgccagccagtttttgcggcagtgtgcgcgcttcactttcaggccagacaaaggtgtaaatcaccgcggacaccacggtaccaatgatgatacccatggcgcgatcgcgaatttccaccaggtcgtacaccgggccaaaaacgttttcgagcgtggcgagcgcgaaggtgaccaccatctgtgtgccgatataagaagagcgttcagagctggtggcaatccatgcgcccaacaggaaaatcggtgccagcacaaacagcaattcgacaatattgtccagccagggcatgaccagtagcgtgaataacagcgccagaatcgcgccgcaaaaggccccgccaaaacgcagcaccatcttctggtacgacgaaccgacatttgggttagcgacgatcacgcatgtcagcatacaggtgtgaatgccttcccagtccacgccgctgtagaaggtgtaacagatcaaacaggcgagcagtgtttttaccgcgtagcgcatatagtctggattggtaaaagcatcggcgaccattgatggcggtttggcggcgggcgttggcggcgtattcgggtccatctgacccagttgtaacaacgtctggcagatattctccaggttacattcccgtgccgccatcgcttcactttcagtgatccgccagtcgctttgccagcactgaccttcagcaacggcatgctgcagcttattgatttctgaggctaatttttgccgaaattcaataattgcctgagaatcagcaaaagaggtgggatcgtagcgattcagcgtcgagtaaatgtaggttaccgttgccacgcagctttgccaccatgcgctttgagttcgccagttggcatcgtccgcgagacaaaagacattcagtttttgcagcgccagcgcctctctttcaatccgcgtttcgggtagcggtgcgaggctgtccgtcaggtgactaatggcatcatcaagccgatcattaagcgcttgatgcatttgcgtaatggcacgactgggaaaccacagcacgccgattaacgtcatcagcaaggttggatagaggccaacaacgatacaccacagcgttaagcgcacgaccacttccggatagtcgagcatggcggggaaggtttgcccgtaaatggcgacaatggcgacagcgaaaaagaccagtcccagccgatgggtgcgcatcaaaaacatacagcccatcaggatcggcccggcgatgatcaatcggatcaacggttcgccgtatgaccatttgtagatcaaaaacaggctgccgatctccagcaccgtggcaaccacaaacaagatcgcgacaaatttggtgtaaaacgcgttcgactgaataccgtaaaacagcactgccagcgataacgccacaaaagggatctcaaaagtcatcgagatcagaatcaccagcaggcagcctacccagagttgcacgatctgcggcacgcggccgggtcgccgctcgcttaactcttcatgaaagaacgccagcagcctgaccaccggtaatggcagggagttgagcgcgctcattattgcggctcaagattagcgactgccgaagcgccgatgcggaacatttccgggtcaggtttatcgaccatgattttgaccggaaaacgctgggcaacgcggacccagttaatagagcgagaaactttcggcaggccgcccagcaccaggccgccgtcatccggtagcacgccgtagccaatcgaatccactttaccctcgaaggttttgccgctgtcactcatcaggcgaatcgttgcgggtgtacctgagcgaatatttttcagatcggtttcgcggaagttggcgatcacgtaccagtgacgagtgtcgattagggtaaaaatagggcgcatggcagaagcaaattgcccgacggaggttttgagggaaatgacccggccatcaaacggcgcgcgaacggtcgccatttccagatgaagtttggtcagggcaatatccgcttcgaccgccgcacgttgcgccaccagcgcatcgacgccgctgacggcgctggcggctgactgcgcctgtaacaatacggcattaagatcggcttctgcggcgcgctgcgcagttcttgcacggtcaacgtcttccgctgagacaaaaccctctttcagtaatggctcggtgcggcgtaatgtatctgtggcctgtttcgcggcggcacgggctttttctaccgtggcattaatcgagtcggcaccaaactgttgcgcatcaacgctacgctgggtgagcataatttgcttatccagctttcgccagattggcttcgtacgggcgcgggtcaatgcggaacagcaaatcgccctgtttgactgcctggttgtcggtgaccgccagttctacaatgcggccgctgacttccggcaccacatcaatggtatctgctgacgcgtaagcgtcattagttgatggcgcactgtctacgcgccagataacgaaaacaagggcaaccagcgccaatgcaaccactaacagagcagggaatttactgcgaggagcttttttcggcgtactttccatgagcgcgtctcaaatagattagaaaaatgccagccagaacagcatggcgtagagagcaaaaagggcggtataaataattccgacaaatgccagattgatatttgcccgctgaataactcgcctcgtgatgagcatcaaaataaggctggcaatggcgcagaaaaaccagctgggataataagcaccgatcaccgggattgccggagataatgagcatcccgaaaccatgaagacgggaattatccaggctgtttttttgagttgcatcgccatgcgagagagaactgttggcatattaaatacatcctgtctgctgcgaacaatatctgtagtgaatatcaatatccattgaaggcgtcag

SEQ ID NO: 237 - DNA, 20504 bp, Escherichia coli
  source 1..20504: mol_type = genomic DNA
ctattctaaaaaatagagagccccgttagatgaatacttccgcgcataatatattcaacacaaatatagacctgaagcggtaaattaccaggctgaaaattctttttatattgtcaggtatttcttaaattatcttaatccttagacaaggaaataaatcagttccagatttacaacgccatcatggacgaaaaatgaagctttcagtctcagcgacggtgcgcctcaccttcgcaagaggtcgcttcacgcgataaatctgaaacgaaacctgacagcgcgccccgcttctgacaaaataggcgcatccccttcgacctacgtaacagatggaatcctctctctgatggcagcaaagattattgacggtaaaacgattgcgcagcaggtgcgctctgaagttgctcaaaaagttcaggcgcgtattgcagccggactgcgggcaccaggactggccgttgtgctggtgggtagtaaccctgcatcgcaaatttatgtcgcaagcaaacgcaaggcttgtgaagaagtcgggttcgtctcccgctcttatgacctcccggaaaccaccagcgaagcggagctgctggagcttatcgatacgctgaatgccgacaacaccatcgatggcattctggttcaactgccgttaccggcgggtattgataacgtcaaagtgctggaacgtattcatccggacaaagacgtggacggtttccatccttacaacgtcggtcgtctgtgccagcgcgcgccgcgtctgcgtccctgcaccccgcgcggtatcgtcacgctgcttgagcgttacaacattgataccttcggcctcaacgccgtggtgattggcgcatcgaatatcgttggccgcccgatgagcatggaactgctgctggcaggttgcaccactacagtgactcaccgcttcactaaaaatctgcgtcatcacgtagaaaatgccgatctattgatcgttgccgttggcaagccaggctttattcccggtgactggatcaaagaaggcgcaattgtgattgatgtcggcatcaaccgtctggaaaatggcaaagttgtgggcgacgtcgtgtttgaagacgcggctaaacgcgcctcatacattacgcctgttcccggcggcgttggcccgatgacggttgccacgctgattgaaaacacgctacaggcgtgcgttgaatatcatgatccacaggatgagtaacatggcgacattttctttaggtaaacatccgcacgttgagctgtgcgacttgctgaaactggaaggctggagcgaaagcggcgcgcaggcgaaaatcgcgattgccgaaggccaggtgaaagtcgacggtgcggttgaaacgcgcaaacgctgcaaaatcgtcgccggtcagacagtgagttttgcaggtcacagcgtacaggttgttgcctgatccctttcccggcctgtatcaacaggccggttctcttttcagacttttgccctctacgccccgttcatccatgctgatagcatcgacattttgccgaagcgaccatcatgccaaccgttattacgcacgccgccgttcccctatgcattggtttagggttgggttcgaaagtcatccctccgcgcctgttatttgccggaatcatcctggcgatgctgcccgatgccgacgtcttgtcgtttaattttggcgttgcttacggcaatgtttttggtcatcgcgggtttacccattcgctggtgtttgcgtttgttgtcccgctgttatgtgtgctgattggacgtcgatggttcagggctgggctgattcgctgctggctgtttttaaccgtctcgttgctatcgcacagcttgctggattcggtaaccactggcggtaaaggggttggctggctgtggccgtggtcagatgaacgctttttcgctccctggcaggtgattaaagtcgcgccgtttgcattgtctcgttacaccacagcgtacgggcatcaggtgattatttctgaattgatgtgggtgtggttgccggggatgctactgatgggaatgttgtggtggcgcagacgataaccggatgcgaaaactcgcatccggcaatagcgcaattacttacgacgccaggtggtcccttgcgggccatcttccagcacgatccccatctcattaagacggtcacgcgccgcatctgccgccgcccagtctttcgctttacgggcatccagacgctgttgaattaacgcttcaatctcagccacttcgctgtcgtctgcctgcgcgccgctttgcaggaacgcttccggttcttgctccagcaggcccaatacggcggaaagtttacgcaggtgagatgccattgcattcgccgctgccatatcttctgctttcagacggtttacttcacgcgccatatcaaacagcacggaataggcttccggggtgttgaaatcgtcgtccatcgcttcaataaagcgcgcttcaaacgcttcgccaccggcaggcgcaacggttttatctgtgccgcgcagcgcagtgtagagacgctccagcgccgcacgcgcctgcttcaggttctcttcgctatagttcagctggctgcgatagtggcccgacatcaggaagtaacgcacggtttccgcgtcgtagtatttcagcacatcgcgcacggtaaagaagttacccagcgatttggacatcttctcgcggtcaaccatcaccatccccgagtgcatccagtagttcacatactgaccatcatgggcacaggtggactgcgcgatttcgttttcgtggtgcgggaacatcaggtctgaaccgccgccgtggatatcaaagtggttacccagctgcttgcagttcattgccgaacattcaatgtgccagccaggacgacccgcgccccacggagacggccagctcggttcgccctctttcgacatcttccacagaacgaagtccattgggttgcgtttgtcgtcgaccacgtcaacgcgcgcgcctgcctgcagctggtcgagatcctgacgcgacagcacgccataagttggatcggtcgggacgtcgaacatcacgtcgccgttgtccgccacataagcgtgacctttggcgatcagttgttcagtgagttcaataatttctgcgatatggtgcgtcgcgcgcggctccatatccgggcgcagaatgttcaacgcatcaaaatctttgtgcatttcggcgatcatgcgatccaccagcgccacaaagctttcgccattttcattggcgcgtttgatgattttgtcgtcgatatcggtaatgttgcgcacatacttcagcttatagccgaggaaacgcagatagcgcgcaaccacgtcaaaagcaacaaaggtacgcccgtgaccgatatgacagagatcgtaaacggtgattccacacacgtacatgccgacttccccggcgtgaataggcttaaattcctctttttggcgtgtcagagtattgaagatttttagcatcgaagattccgtttagacatgtgtgggtaattgagttgcgtataatacccatatttcccgcgcgaatcagcatacattgcgtgatgatccgatcgtgcggttatgctataacaccaccctatatatgacccgaactgggttgaagcaccaatcaaacggaacaggatgcaaaaatggttactttccacaccaatcacggcgatattgtcatcaaaacttttgacgataaagcacctgaaacagttaaaaacttcctggactactgccgcgaaggtttttacaacaacaccattttccaccgtgttatcaacggctttatgattcagggcggcggttttgaaccgggcatgaaacaaaaagccaccaaagaaccgatcaaaaacgaagccaacaacggcctgaaaaatacccgtggtacgctggcaatggcacgtactcaggctccgcactctgcaactgcacagttcttcatcaacgtggttgataacgacttcctgaacttctctggcgaaagcctgcaaggttggggctactgcgtgtttgctgaagtggttgacggcatggacgtggtagacaaaatcaaaggtgttgcaaccggtcgtagcggtatgcaccaggacgtgccaaaagaagacgttatcattgaaagcgtgaccgttagcgagtaatcgtggcgacactctttattgcagatcttcatctctgcgtggaagaaccggcgatcaccgccggttttctgcgttttttagcgggggaagcccgcaaggccgacgcgctgtatattcttggcgatctgtttgaagcatggattggcgacgacgatcccaacccactccatcgccagatggcggcagcgatcaaagcggtgtccgattccggcgttccctgttatttcattcatggcaaccgtgattttctgctcggcaaacgctttgcccgtgaaagcggcatgacattattgccggaagaaaaggtgctcgaactttatggtcgccgggtgttgattatgcatggcgacacgctgtgcaccgatgacgcgggttatcaggcttttcgcgccaaagtccacaaaccctggctgcaaatgctattcctcgctctgccgttgtttgtgcgcaaacgcattgccgcgcgaatgcgcgcgaacagtaaagaagccaatagcagtaaatcgctggcgatcatggacgttaaccaaaacgcggtagtcagtgcgatggaaaaacatcaggtgcaagggctgatccacgggcatacccatcgcccggcggtgcatgaacttatcgccaatcagcaacctgcttttcgcgtggtactgggtgcctggcatacggaaggttcgatggtgaaagtcacggcggatgacgttgagctaattcattttccgttttaaaaaacccgcaactttgctgatttcacagccacgcaaccgttttccttgctctctttccgtgctattctctgtgccctctaaagccgagagttgtgcaccacaggagttttaagacgcatgtcttcccgcaataatccggcgcgtgtcgccatcgtgatggggtccaaaagcgactgggctaccatgcagttcgccgccgaaatcttcgaaatcctgaatgtcccgcaccacgttgaagtggtttctgctcaccgcacccccgataaactgttcagcttcgccgaaagcgccgaagagaacggttatcaggtgattattgcgggcgcaggcggcgcagcgcatctgccaggcatgattgccgccaaaacgctggtgccggtgctgggcgtgccagtacagagcgccgcactgagcggtgtcgatagcctctactccatcgtacaaatgccgcgcggcattccggtgggtacgctggcgattggtaaagctggcgcggcaaacgcggcgttactggcagcacaaattcttgcgactcatgataaagaactgcaccagcgtctgaatgactggcgcaaagcccagaccgacgaagtgctggaaaacccggacccgcgaggtgcggcatgaaacaggtttgcgtcctcggtaacgggcagttaggccgtatgctgcgtcaggcaggcgaaccgttaggcattgctgtctggccagtcgggctggacgctgaaccggcggcggtgccttttcaacaaagcgtgattaccgctgagatagaacgctggccggaaaccgcattaacccgcgagctggcgcgccatccggcctttgtgaaccgcgatgtgttcccgattattgctgaccgtctgactcagaagcagcttttcgataagctccacctgccgactgcaccgtggcagttacttgccgaacgcagcgagtggcctgcggtgtttgatcgtttaggtgagctggcgattgttaagcgtcgcactggtggttatgacggtcgcggtcaatggcgtttacgcgcaaatgaaaccgaacagttaccggcagagtgttacggcgaatgtattgtcgagcagggcattaacttctctggtgaagtgtcgctggttggcgcgcgcggctttgatggcagcaccgtgttttatccgctgacgcataacctgcatcaggacggtattttgcgcaccagcgtcgcttttccgcaggccaacgcacagcagcaggcgcaagccgaagagatgctgtcggcgattatgcaggagctgggctatgtgggcgtgatggcgatggagtgttttgtcaccccgcaaggtctgctgatcaacgaactggctccgcgtgtgcataacagcggtcactggacacaaaacggtgccagcatcagccagtttgagctgcatctgcgggcgattaccgatctgccgttaccgcaaccagtagtgaatagtccgtcggtgatgatcaatctgattggtagcgatgtgaattatgactggctgaaattgccgctggtgcatctgcactggtacgacaaagaagtccgtccggggcgtaaagtggggcatctgaatttgaccgacagcgacacatcgcgtctgtccgcgacgctggaagccttaatcccgctgctgccgccggaatatgccagcggcgtgatgtgggcacagagtaagttcagttaacctggtgctcatttgattgccggatgcggcgtaaacgccttatccggcttaccgctccggtacccattgtaggcctgataagacgcgtcaagcgtcgcatcaggcatggtgcaccgattgccggatgctctcatcactacagcgaaatacaggtccccgcttcgcccgccagcgtctcttcaattcgcgataacgccccaatccacgcgggtttaccacggcttctgacataaccacttaccgccgttaccttcggccccatcgaaccatcggctttggcaaatggcgctaactcatccggtgtggcatggcgaatggcgcgttgctgcggcgttccccagttttcataaaccgcgtcagcatcggtgaggatcaccagtccatcggcattaatctgctcggcgagcaacgcagcggcgagatctttatcaatcaccgcttcactccctgccccatcttccgtcacaggcacaccgccgccgccactgcaaatcaccacatgcccctctttgagcaacaactcgatggcttcgctgtcgagaattttacgcggttgcggagacgccaccacccggcgcaaatatttaccatcacgtttcatctgccagccgtaagccgcttccagtgccttttgttcttctggctgataaaccggaccaataaatttctctggctgcaaaaacgccggatcatcaggcgaaacctcaatgcgcgtcagcaccgtcgtgacaggcggcatctgcggctgtgcgctcaaactctgcgccagcatatagccaatcatcccctggctttccgccaccagcacatccagcggatacggatctacctctttccacgccagattctgcaatgccagcagccccacctgcggcccattgccgtgaacaatcgccagccgataagaacgggccaggcgcgccagcgcgggtacagcactggcgatattgcgatattgattttctgccgtcagcgcctcaccgcgctggagtaaggcgttgcccccaagagctacaaccagtgttttcatggtgttccttgtaataattgttgaccaagccagaaccccagcagcgtatctgcccctgacgtgtgccccagcgccagcagcgaatcaatcgcaacagcggtacgtttcgggcaactcagagcatgaacaaagtgcaggagtggcgaggcgaaatatccttgcgcggcgtagcgtaaataactgacgctcaccgctgtggtaacgagttgaagattgtcggagcaggcaaaaaactggcgaccggagcgcgcatctaaagcgccataataccaggccgccagcagcattccgctcaacgtgtcatcatgacttggcgttaatccggggcctttacccagccagtgccgccagtcggtcttaacgccattgagcgcggcctgaaaacagtgacgaaactggcgtaattcagcggtcagcggatcgcttgccgccatcgccagtggtccgaaaagtccggtttcctccgcgcgttgcatccatgcagctgcaagcggttgaggatgtgaaggcggcgtaatacgcagcaaacaataacgctgtggctgtttaaccgtgaaacgcccgaggcgaatcccttgagccacaacctgtggtcgttcattgccgcataatccaccgcataacgcatcgaattgcgcgcggcgaagcacccatcctccggggccgaaaccactaccctgacgatgcagcgttaacagttcgccgctttccgtcatcaggttaatcgcccgtcgccacactcccgctaaccgccaggactggcgataattcggtgcactacggctggcaagcagaggatggatgatcgtcattgcgcgttcctcaaccaatccccatgctttcagccagtgcttccagcgcctgttcaaaacacgccagcggtgcccgcacagtgcctgcgccaatctgcccgatccccgcctctttatgggcgataccggtattgatgagtggcgtaatgccggtttctaccacgcgacgaatgtccagtcccaggcacgcgccctgaaaatcccagcctgggatctgcaactgcatattgcgctcaaggtaaatttccgccatctcttcagataccgctctggccgcttccatgccacccgcaccgacaaagcgcgttacgccaggcgctgcgatcattgccgcacctccgataccaaaggtttcggtaatcgcgctatcgcccatatccgggttcgcctgctcctgcgagaagccggtgaaaaacagaccttgcggagtgtttacaggcgcagtaaaccagcgttcgcccagcccgcttacccgaatcccgaacatattgccgttgcgggtcattgccgtgacgatgctgcctgcgcggatcatcgcgccagcatccatcgccgccttgcagtaagccatcgcgaggttgaggaagaactgatcggtcacgctgaggaaatccatcacttcggcgatgtgctgtttatcatgatcgaggcgagcaatttgtggggccagcgcacgcattaacagtgcagaggaagcaatattgcgttgatggaactcatcgcccatcgtaatgccctgcgccatcatcgccgtgagatcgataccgcgctccatgcgccccagcgccgcgcttaatactggcattaacacatcgcgcatccagcgatggcgagtcaggacatcttcgccgtaagcgccaaaacgcatcactttgccgataccttcgttgaggttgcagtacgcccggttgccgtcggtcacgttctcgaccaccagcatcggcatactggcagaagtaataccgcccattggaccgacggcattcacatggtgacaaggaatgaagttcacttccccctgctccagtattgccagcgcctgcgcttcatctttcgcccagccttcgaacagacatgcgcccacgcacgcccctttcatgggtccggtcatctcctgccagcgcattggcggcccggcgtgaagcagtgttttgccctcgtttagttcgctgataagtgaagaagccggttgcacatccagccagtgtggacgagcacgacgaatttgttcgataaccgcagcattggcttgcgccactgatgtaaacatgggaaccccttattgcaaacgttctaataaacgagccagttttttattgccgccggcgactggcgaccattggtaatgcacaaccggtttgctggcgctttgtagctccagcgcaaagctgcgtaatccgatgttaatcacggcgacgttttccagtaatgacggtgtgtgttgctgagtggcaggcgaaagcggacgaatcagtgccgccgccagcaaggtggcttccggcagcgaactcactaccgcgatccctgcatcttccagcgtggcgatttgctgcgagcggcattgcgggtcacgttcagtgcctgtcaccgtggcaatggcatacagtggttgattgtctgaacgcgcggcacatgctttttgccaggcgcttaccagcgaggcggcaggatcggcggtcgcaccgaagccaatcacgacatcaagcagcaatacgcgcacttgcggtttagcgccgagatcggcaattaactgattgcgtaaggctgggtcgatcatcggatggggacgcccgacggtgtagaaatcatcgccgaggtcaataatctggtgaccatcggcgtcgagcatcatgccgtgatgatgggtatcgtcggcttccacgccaaggtgcccggcaagtaatcccgccgcttcggcagccagcgtaccgccggtatacaaaccgcaaataaatccgctgctggcaggcgttatcgcgttacgtcgcgccgtaacgcgtgaaagcaggcaagccaggcgtgcggcctcatcctgcgaggaggcaaaccagacattctcgtcgcgggccaccgccggggtataacctaaaaacagcgccaccgtcggtttgccggttgctttcatggcattaacaattttcagacgcacagcttcggcaggcggttttgaaacaaatgccagcacttcgcttttctcgtctgcactgagcatttccagcgccgtcagcgcactgatgccgcccacttcacggctgaggtcgcgcccgccaaggccaatcgcgtgagtaattccctcccctgccagcgcaatctgtgagcacagctcctgaatcccggtaccggaagcgccaatgacgccaatgttgccttccggcatcacgttagcaaaagccagcggcgtggcggcaatcatcgacgtaccgcagtccggccccatcaccagcaagcctttttctcgcgcgcgggttttaagttggatttcatcttccagcgtgacgttatcggagaacatcatcacgttgaggttgcgatccagcgcctgattcgccagctccgccgcatactcgccagccactgaaatcagcgccagattggcatcggataatttctgacaggcactgtcccagcgacgcacctgcgtcaaggactggctgctgcctgacccctgcgccagttgttttagcgcctcttcaagctgctgcataatcgcctgcgcgatccccgcatccgccgcttcgctacgtattgccacgcaaatatcgttcggcgtggcgttattaaaatcgtcatgccagaaacctgtggtatctaataacgctttattggcgggcgtacccatcattacggaaacatcatcaacattttctgattcgctgagttttcgtgaaataatcattaaactgaccgaatcctgaaaacacccttttttaataaaggcgtggatcataacaactccttaaaaattgcacccatggcaattgcacgagcagtgttaatgtggcgattacggtatcgatgacaacgagtaaataaggtgatgaatatcacacaggaattattaacaaaagaattcaaataaccgccaggctattacgcattattttttaataagcgtggttgttttaaaaatcaggttaaaagtgagcggattatcaaataaattctaactatatttttttgcctgtctggatcacataatccagatattttccctgtatgttaattgcagtcatgcttcacaccgtcgttaaaaaggaagacagatgaaaatcaatcgggaaacactccaccagctaattgagaataaactctgccaggctgggttaaaacgtgagcacgctgcaaccgtggctgaagtattggtttacgccgatgccagagggatccacgctcatggcgcggtgcgcgtggaatactacgcggaacgcatttcaaaaggcggcaccaaccgcgaaccggagtttcgtcttgaggaaaccgggccgtgctcggcaattttacatgccgacaatgccgccggacaggtcgcggcgaaaatgggtatggaacatgccatcaaaaccgcccagcaaaatggcgttgcggtggtcggtatcagccggatgggtcacagcggcgcaatctcttattttgtgcagcaggcagcccgcgccggattcattggcatttcgatgtgccagtccgatccaatggtggtgccgtttggcggcgcggaaatttactacggtactaaccccctggcctttgccgcgccgggagaaggcgacgagatccttacctttgatatggcgactaccgtacaggcatggggaaaagtgctcgacgcccgctcgcgtaatatgtctatcccggatacctgggcggtcgataaaaacggtgcaccaacaaccgatccgttcgcggtacatgctctgctccccgccgccgggccaaaagggtatggcctgatgatgatgattgacgtcctctcaggcgtcttactcggcttaccgttcgggcgacaggttagttcgatgtatgacgatttacacgcagggcgtaatttggggcaattacatatagttattaatccgaactttttctcctccagcgaattattccgtcaacatcttagccagaccatgcgcgaattaaatgccattacccccgcgcccggttttaaccaagtttattatcccggacaggatcaggatattaaacaacgcaaagccgccgtcgaaggcatcgaaattgttgatgatatttaccagtatttaatttccgacgcgctttataacacgtcatacgaaacgaaaaatccctttgcgcaataattattgagacaggactttcttatgattacacattttcgtcaagccatagaagaaacgctgccctggctttcctcttttggcgctgacccaacgggtgggatgatccgtttactttattcgccggaatggctggaaacccagcagcaatttaaaaaaagaatggcagcaagtgggctggaaacacgtttcgatgaagtagggaatttatacggtcgcctgaatggtaccgaatatccacaggaagtgattctgagcggttcgtatatcgataccgtggttaacggcggtaacctcgacgggcaattcggcgcgctggcggcgtggctggcaattgactggctgaaaacgcaatacggcgcgccgctacgtacggtcgaagtggtggcgatggcagaagaagaaggcagccgcttcccgtatgtcttctggggcagtaaaaatatctttgggctggcgaatcctgacgacgtgcggaatatctgtgatgccaaaggaaatagttttgtcgatgcgatgaaggcttgcggatttactctgccgaacgccccactaactccgcgtcaggatattaaagcttttgttgaactgcatattgaacagggctgtgtgctggaaagtaatggtcaatcaattggcgtggtgaatgcaattgtcgggcagcgtcgctatacggtgacgctgaacggcgaatcaaaccatgcaggcaccacgccgatgggttatcgtcgtgatacggtttacgctttcagtcgcatttgccatcagtcgatcgaaaaagcgaaaaagatgggcgatccgctggttctgacctttggtaaggtggagccgcgcccgaatacggtgaatgtggtgccgggtaaaaccacgttcaccattgattgtcgtcataccgacgccgccgtcctgcgtgatttcacccaacagttagaaaacgacatgcgggcgatttgcgatgaaatggacattggtattgatatcgatttatggatggacgaagaacccgtgccgatgaataaggagctggtcgccaccctgacagaattgtgtgaaagagaaaaactgaattaccgggtgatgcacagtggtgccgggcacgacgcgcaaattttcgcgcctcgcgtaccaacctgcatgatttttatccccagcatcaacgggatcagccataacccggcggaacgcaccaatattaccgaccttgccgaaggggtcaaaacgttggcactcatgctttatcaacttgcctggcagaaataaggagttataaatgggatatttaaataacgtcaccggttaccgcgatgatttactggctaaccgtgcgattgtgaaacacggtaatttcgcactgttaacaccagacggtctggtaaaaaatattattccgggctttgaaaattgtgacgcgacaatcctctccacgccaaagctgggtgcctcttttgttgattatctggtcacactgcatcaaaacggtggcaaccaacagggcttcggtggcgaaggcattgaaacgttcctgtatgtgatctctggaaatatcactgccaaagccgaaggcaaaacatttgccttaagcgaaggtggctatctttattgcccgccaggctccttaatgacgtttgttaacgcccaggccgaagacagccaaatctttttatataagcgccgctatgttccggtagaaggctatgcaccgtggctggtttctggcaatgccagcgaactggaacgcattcactatgaaggtatggacgatgttattctgctggattttctgcccaaagagttaggttttgatatgaacatgcatatcctctcttttgcaccaggtgccagccacggttatatcgaaacacacgttcaggaacacggtgcctatattctttccggtcagggggtttataacctcgacaataactggatcccggtgaaaaaaggcgattacatctttatgggcgcttattctttacaggctggttatggtgtagggcgtggtgaagcgttcagctatatttactcgaaagattgcaaccgcgacgtagagatttaagtcataccactcgcctgattatttttagctatgttggattttgccacggtttataccgtggctttttttgtaacattgcctgatgcgcttcgcttatcaggcctacatgatctctgcaatatatagaatttgcgcgattttcaggaaggatatagtactcatgccgcatccggcatgagcactgcgctcttatacgaaataaatagcatccgctttaaaggcaagagtcaatttttaattccctgacctattttaatggcgcaggcaatatttcgcgcgctgttgaagagattggtttcaccgctggcgagcacttcggctaaaggtgccagacgtggcaaaatgctgaataccgcgtcaatgccgtactggtgtaccacttccacgccatcacccaatacgccagcaattccaatcaccggtacattaaactgtttcgccaccgacgccacacccagcggcgctttaccgcctgccgtttgcgagtcgatgcgcccttccccggtgatcaccagtgctgcgccctgcactgcctgcgcaagattgactgcattcaacacaatttcaatgcccggtttaatatccgcattgagaaataccgccgccgcaatacccataccgcccgcagcgccgccgcccgccatctggcagacattaatttcagtttgctgttgtaaaacacgggcgtaattttgcagcccctgttccagctcttcgaccatctccggcgttgcccctttttgcgggccaaataccgccgccgcgccgcgtgcccctaccagcgggttatcaacgtcacatgccacttcaatatggctgttcgccagacgcggatcgcattcctccatctcaatgcttgccacgcgcgctaaattgccgccgttagccgccagcacctggccgtcggcatcaaggaaacgcacaccaagcgcctgcgccatgcccataccgccgtcgaccgtcgcactgccgccaatgccgagaataatatggcgaatgccgttatccagcgcatgacgaattaactcccccgtaccaaaactggaggccagcaacggattacgcttttcaggcgcgaccagcatcaggccacttgctgccgccatctcaatcaccgccgttttcccgtcgccggtaaggccataaaaagcattcactttttcgcccatcggcccgcagacttcaagcgtcacgatgttgccgcccgtcgcggcgaccatcgcatccaccgttccttcgccgccatccgctatcggcaaacagatatagttcgcatcgggaaagagggtcgaaaacccggctttaattgcctgacaacatttttctgcacttaagctctctttaaaagagtctggcgcaatgacaatcttcattatcaatcctttttcaacaaattattcgatacgttcccacggaataaggttatccataagaacagccagtaaaatcccgaccaataagccgttactgagcagaggacgaagcgttaatggaaggtcttgcagatacacaggcggtaatgccattaaaaatatgccgacaaataacggcaatgcgagtcgataaatattgcgagcggtaaaggttatttgctggctaaacaccagcgcggaaaagagtaaaggcagataagaaaccagcatgaccgcgctactcacgggtaaagggatactgcaaaacagtcgtgtgagtgccggaaccagcgccaccagcaggcaaataacgctgccataaataaacgaacgccgcgtgtaatcgcctgtctgggttaataaaccaatggatgaaacaaacggtgaaaatggaattaccgccagcggtacggttatcagcgtcataaatccggtcgccacaaagctgcgacgataacgcgtatttcccgcgccctgctgcggataaaaaacatccgtgccccgaatcgcaccgtaggtattgctgatattcaccagacctgtaatcaccgccgtcagaataattcccggagacaaagcacctccactgccgagcgggaaccactgccagtgcaactcaccggagagcgagtgcgaagaaggaaagcaaaagtaccacaacaaccagccggttatggtgccgaccagcaggccataacgggcaaaacgttgcggcaggaagataatcatccccagtaccaggcacatcaccgccaccgagagcgcgaacggcggtaactgaattttaaaatttgggtcggctatgccaaacggcagcccgagcatacctttgaaaaagatagtggtcagctgcgcgcccagcatcaacataaacaagaccatcaccgacggcgtaaataaccgtgccaggcgatggcctaatccgctaaaaccaatcaacatcgtcagcacgccggagagcgcaatccccaccgccaggctggtagcgatatcgttgatcggtgtcccgcgcgatgcttcgccaagggtgatagtaaggatggttccccaccacaggccacccggcccttccataatagcgcgacgatgaccgcagaacgcctgagcgaagcaggccagtgcggtagcaagaaaagcatattgcgtgagcgtaagcaggctactttgcggcaactgaaaagcagaaagtagcgtaggaggaaccacaaccgtgttgcaaaaaataaagaaaaaccactgaaatcctgataacaggctttcgcggctgactgcaaaattgaacataaacacaccttaaccggagaatgcccgccgcaaggacgggcattgcaggggccagattactgctgatgtttaaggataaattgacctttcggcgcaacagggaagccctgttcaatgtcgtaaatcacatcaccacgtaagatggttttcgtgatacgcgcgccaatggtacggccaacatacgggctgactttgtggcgatattccagatcgtcattggtaagaacatagctgctattcggctgaatgaagacgaagtcggcatcttttcctggggcgatacggcctttttgctgcagaccgaaaatatctgctgcgttagtcgccattaatttgccgaacattggcagagacattccgcgtttctgtaccgcttcatcgaacatcacgtccatacagttttgcagaccggcaataccgccccatgcttccatgatgttgccggctttcatttccggagggcatggtgagtggtcggaaaccaggcagtcgatttcaccgttaaacagtttttcccacatgcctttctggttttccagatcgcggatcggcggtgaacacttcgccagagtgccgatttcttcgaactgatcggtatccagtacaaagtaatgcgggcaggattcacaggtaacatcctgaccttcctgacgtgcacgagtcacttcttcaacaccttccgggctgctgatatggcaaacgtgcagacggcaaccggcaactttcgccagatacagcacgcggcgaatcgcttccacttcggtaaataccggacgcgaagccacatagtcatgggcagttacgcgaccttcacgtttcgcttcttcgcccagtgcgtcacagatcagcgcgttttcgcagtgcaccaacaccggctgccccagttcgcccagcttctgcgcacctttgaagaactgccagtcgtttacatcacggaagtcgttgtcgataccgcgatcgccacaggtcgcaacgaagcatttgaagccgacaacgcccacttcatccaactcatgcagacgatcaatgttgtaagacaccaggccaccgagttgtgccgcatcgatagtcagcttgcctttagcggcatcgaacttcagttcaattgaagcacggtcaaccgttgcaggcagctggttgagcggcatttcgatcatggtggtgataccaccttttgccgctgcgcgagtaccggtttcataaccttcccagtggctacgacccggttcagaaatatgggtgtgcgcatcaaccatgcccggcgaaaccaccagaccagacgcatccataacttcttttgcatcgcccagatcctgaccgatagcagcaatttttccgcctttaacggcgatatctacaacgcgagcttcgttttctaaaataacggtgccgtttttaatgattaaatcaaaagacataacaaactccttgtaaaatacagattggtttttaactcaatgttcaatatcgggattaattaacctatggttttttgctctcctgttttttctgctgttgtacgtttctttaataaggcgtaggccgcaaaggcgacgatgacgccgacaaaccatgaaacacgcgataacggttccataaagggaataaacttaccgccaagagataaaataacggccaccagagttactgaaaacgcagtgaggttaaaaccgttatcgtaatatttataatcgccaggtgcggtatacagttcatcaagattaattttcccacgcatcaccacaaaataatgcgccatcatgacaccaattaccggaccaagcattccgccgataatatcgaggaacagataaatactgtcctgattttccattaatttccacgggcagatcagcaggctgataatactggcaatcagtacgccgtttttataagtcagtttcgtcggtgcaatagcggcaatctgataaccggcaggaataatattaccggtggcgttagtggagatagtcgtcatcagaataaccagtaccgcaaagaacgaggcgaacaagctgtcccaacgctgaacaatatccagcacgttccaggtatcagcgccgtaatgaatactggctccggcaataatacatacccccgcgaccgcaaacagaatataggccacaactaaacccagcgtttgccccagcgcttgctcacgaaacgagtgggcgttttgcgtaaagtcggatgcgctcaccgccggtgccgcccagaccgcaactaccgcgtttatcaccaccaggaacaggaagccactgttttctgctttctgaataccgctcggaatgtagtcaaagattggaccgagcccgaccagcgaaatcgcccaaatcgccataccgccgaaaacgatatagatgcacgggttaagaatggcagtgaatttatttaaaactttgccaccgccaaaacctataccaacgttgaccagccagaagagtaagaaagtaattaagcccggtagagaaagccctaacagcgtgaaatcaccaccgagagttaaaaatcccggccagattttgccaatcagaatcaagcaggccagtgaccccgcgtaacattgcaggccaaaccacataatggcagcaataccgcctcttaataatccgggaaacagtgcgccacgtacgccgtaagaagcacgcaggatcatggcaaacggtacgccgtatttactgcccgcagcgccgtttaataccattaccgcggcaatgaaaaaggcgctgaggataattgccagcataatactaaaggtagacaagccgagaataaaaaagccgccgaccatcacataattgggaacgttatgaaccgaacccatccataaggtaaaatagttaaatgttttccaggtccgctggctttgcgttttcggcaatagatcttcgctatagccgcgttgctggaatagttttctctgatgttccataaatccctcttaatttcacgtatcgaataacgttgttttaatctagctatgaggaacaaataaaataaaaatattatttttaatactgaagcaacatctttggctgc

SEQ ID NO: 238 - DNA, 20324 bp, Escherichia coli
  source 1..20324: mol_type = genomic DNA
atcctctggtatcccactcaaataatttcattcctttttaatacttcttgtaatttcggtaactgacatacagcatcagcaatcgcactgatattcgtggcattatcctgaaaccattcatgcccaggcccccatgtgcgcatagtgcaaagataacagtccaccagcgttagttgctcaccaaacgcataaggttcagcggtcaattgtgaattcagccagatataaagcgatttacgatattcaataacattcttctttaactgttcaggtgcgtcaggagcccaacgctcagggtaatcggcgaaagtgaatgttggatagacattagcaaccagccagaccaatagccgttgaaactgctgacgttcggcgcgcccaaccggtggcgcaaggtccgggcgacgatcgagaaccatcaatgcaatcgccgctgtctccgtcataatctcgtcattttccagcgccagtgtcggaatctgacacaacgggttcagggttttcaataactcgcgtgaagttccctcgtggtcaaaaccactgacatcaacgaactgataaggaatatcagccagtgttagcatcagctcactgattgtagagccccatccgggtacgccatacaccttaatcatatgcccctcacaatcttttaaagattaagtgtaggacagtacacaggttaaccagcaaaaggatttgtcattttttcgtcagttgtattaatccccttcaggattataaggggatgttttgcatcgtttatcgataacgggtaggatgctgcgccgatagttttatacccataaagaataatggtgataactatcatcgccaggatgaataaacattgttcatggcaacttatatgactttttcattaaagcaatcagggagagcaatgagtaaacacgacaccgacacttcagatcaacacgccgcgaaacgccgctggcttaatgcccacgaagaggggtatcacaaagcgatgggcaatcgccaggtacagatgatcgccattggcggcgcgattggcaccggcttgtttttaggtgcaggagcccgactgcaaatggcgggtccagcactggcactggtttatttaatttgtggcttgttttcgttttttattctgcgtgcattgggtgagctggtgctacaccgcccttccagtggcagttttgtctcttatgcccgtgagtttttgggtgagaaagccgcttatgttgctggctggatgtacttcatcaactgggcgatgacggggattgttgatattaccgccgtcgctctgtatatgcattactggggtgcgtttggcggcgtgccgcagtgggtctttgcgctcgctgcacttaccatcgttggcaccatgaatatgatcggtgtgaaatggtttgcggagatggagttctggtttgcgcttattaaagtgctcgccattgtgacctttttggtcgtgggtacagtgttcctcggtagtggtcagccgctggatggcaacaccactggctttcatttaatcaccgataatggcggcttcttcccccacggtttgctgcctgcgctggtgttgattcagggcgtagtgtttgcttttgcctccattgaaatggtgggtacagctgccggagaatgtaaagatccgcagaccatggtgcctaaagcgattaacagcgtgatttggcgtattggcctgttttacgtcggctccgtggtgttgctggttatgctattgccgtggagcgcgtatcaggcggggcaaagtccgttcgtgacgtttttctctaaactgggtgtgccatatatcggcagcattatgaacattgtggtgctgaccgctgccctctccagcctgaactcaggtctgtactgcaccggacgtattctgcgctcaatggcgatgggcggttccgcaccgagttttatggcgaaaatgagtcgtcagcatgtgccgtatgccgggattctagcaacactagttgtgtatgtcgtcggcgtattcctcaactatctggtgccgtcgcgcgtatttgagattgtgttgaacttcgcgtcgctgggaatcatcgcttcatgggcgtttatcatcgtgtgccagatgcgcctgcgtaaagcgattaaagaaggcaaagcagcggatgtcagttttaaactgcctggcgcgcccttcacttcctggctgacattactgtttttactgagtgtccttgtgctgatggcgttcgattacccgaacgggacttatactatcgcggcgctgccgattatcggtattctgctggttataggctggtttggtgtgcgcaaacgcgttgctgaaattcacagcactgcgccagtcgtcgaggaagatgaagaaaaacaggaaatcgtgtttaagcctgaaacggcgagctaattgcaaaattgcccggctacgtgccgggcaatttcaaattactgacgaaggtgtgccgcatgcggcgtgataaaagtcaggcaagtctctccgttttcaccctcgccatatctattacagcgcaatacgaatcacatcgtccggctgggtagcttcctgctgtttagtggatttttgttttacactgacatacagcgttttgccatcggcagacagcgccaggctgttcggatgagtcggcgtatcgaacgttttcaccactttatagcttttcgcgtcaatcacactgactttacctgcctgacgatgcgttacgtaggcttcattacgcgctgggttaaacagcacagccagtgattccggtgccgcaaccttcgccagaatattgccattacgggtatcgaccactaacacttctgccgctttagaatcggtgataaatgcacgctgcctggcggtatcaaggctaatgttgataaagaagtgctctttgccgtcatccagcagctttttacggctgaggattttattgtcggcggtgtcgatggtaatcaattcgccgtcagcgttagtggtgtaaagacgtttgcctttgctatccagcgccagaccggtactcattttaccggtgttctggatggcggttttcagtttgatattctcgccatcaacgacccaaatcacgctctctttaccaataccactgatgtaaacggtgttcgtggcatcatcagctaccagctcacgcggttgcagcgggcgcacctcttccgtgcgcttacgatcatccagcaccagacggcctttcacttcgcccgttttggcatctatcgccgtgaccgcgctgtttacggtgttaccaaaccacaacgtctgagtcgtgttattgatggtggcaccaaacggcttgagatcgttatggatcgcctgcgtcacttccagagtgaccggatcaagacgataaaccacgccacctttatccagtttgcggctttgcgaagtggcgagccacagcgcgttttcttgctggctataagccatttcgtaggcacctttacctaccgctttacgcagcatttcttctgcggcctgcgtactgaatgatgaagcaacaagcaatgaacctaacagtaatgaaccacgcaggcgcgatgaaaacagatgacgtaaatgcatgacgactccctttgatgaaccaatatttttgctgcttcacaatgcttcgctaagcgtaatcatcgttacgctcttgttataaatgggaatggtaatcattattttctcaaatgtggagcatttcttgccgttacgactacaattttctcaattaattaacgtatcgtgccgtttcgttttccataaatttacaattttattaccatgacagcgttttcccattcttaacctggcttttttcatgaagattttttccgtccgacagaccgttttgcccgcactgcttgtcctttcccccgttgtttttgccgctgatgaacagactatgattgtcagtgccgcaccgcaggtggtttccgagctggatacgccagcagcagtaagcgtggtggatggcgaggagatgcgcctggcaacaccgcgcattaacttgtccgaatcactgaccagcgtgcctggtttgcaggtacaaaaccggcagaactatgcgcaagatttacagctgtcgattcgcggatttggctcccgttccacttacggaattcgcggtattcgcctgtatgtggacggtattcccgccaccatgcccgacgggcaagggcaaacatccaacatcgatttaagcagtgtgcaaaatgtggaagtgctgcgtggccccttctctgccctgtatggcaacgcgtctggcggtgtaatgaatgtcaccacccagaccggacaacagccaccaaccattgaagccagtagttactacggcagttttggcagctggcgctatgggctgaaagcaacgggcgcaacgggagacggtacacagcccggcgatgtcgattacaccgtctcaaccacgcgttttacgacccacggctatcgtgaccatagtggcgcacagaaaaatttagccaatgccaaactgggcgtacgcattgatgaagccagcaaattaagcctgattttcaatagtgtggatatcaaagcagatgacccaggtgggctaaccaaagcagaatggaaggcgaatccacaacaagcgcctcgtgcagaacagtacgacacgcgaaaaaccatcaagcaaactcaggctgggttgcgctatgagcgtagcctgagcgcgcaagatgatatgagtgtgatgatgtatgccggagagcgagaaacgacccagtaccagtcaatcccgatggccccccaacttaacccgtcacatgcgggcggcgtgattaccctgcaacgccattaccaggggatagacagccgctggacacaccgtggtgaactgggcgttccggtcacgttcactaccggcctgaactacgaaaacatgagtgaaaaccgcaagggctacaataacttccgcctgaatagcggcatgccggagtacgggcaaaaaggtgagttgcgtcgcgacgaacgcaatctgatgtggaacatcgatccctatttacagacgcagtggcagctgagcgaaaaactgtcgctggatgctggcgtgcgctacagctccgtgtggtttgattccaacgaccattacgttactccgggtaacggcgatgacagcggtgatgccagttatcataaatggctacctgccggttcgttaaaatatgcaatgaccgatgcctggaatatctatctggcagccgggcgaggttttgaaacgccgacgattaatgagctgtcttatcgtgctgatgggcaaagcggtatgaacttaggtttaaaaccatccaccaacgatacaattgagatcggcagtaaaacgcgtattggtgatgggctgcttagtctcgcattgtttcagaccgacactgatgatgaaattgttgtcgatagcagtagcggtgggcgtacgacttacaaaaatgccggaaagacccgtcgtcaaggcgctgaactggcatgggatcaacgtttcgcaggagattttcgcgtaaacgcgtcctggacctggcttgatgcgacctatcgcagcaatgtttgcaatgaacaggattgtaacggtaatcggatgccagggatcgcccgtaatatgggctttgcgtcgataggttatgtaccggaagatggttggtatgcaggcacggaagcgcgttatatgggcgatattatggcagatgatgaaaatacggcaaaagcgccgtcttatactctcgtcggcttattcaccgggtataaatacaattaccacaatttaactgtggatttatttggtcgtgtcgataatttattcgataaagaatacgttggttctgtcattgtcaatgagtcaaacgggcgatattacgaaccttcgcccggacgaaattatggtgtcggcatgaatattgcgtggagatttgagtaattaccttgatgcccggtatttgccgggcatttactttaacgattgtattgctggtataaaatagcaatattttgttgcataatttcagcaagacaatgtctgcatccctctttgtcttttgcttttaacgcagcgagtaacagatgatagttttctatatgctcccgtaattccgctggattaatcgcttcatagagataatgtaaaccaggccccatcctgacccacagttgctcaatcatctcacacaggatgggcatatttgagcgatgataaatcgctaagcgaaatagcctgtttacattaatgatttgttccatgtcgcccttttcttgcgcctgctgtaatttctcgagcaattcctggagttccgcaaggtcttgcggggtgaggttttcaacagccagagcaactgccattaattccagttcgtagcggatccgattgatttcgtctaattgacgtttccccacttccggaactgtaaatgcttgtgcaggtgcgacagaaagcgcattcaccgaaaccagacgtaataatgcttcacgcacaggtgtaatactcatacctaattgctccgccagatttttagtaatcaggcgtgcgccaggttttaatgcgccaatactaagctgatgtttcaggtcgttctcaacctgcagagtcaaactgacatgtttcatttttcccgttccaggcattttaattccttcgcgtgttttctgtccaaccctgcctgcatggcagaaggagttcacctggtgtattaaagtgaataatcataaaccacccacctttgttgttattagcagcagaacaatgacgtggttagttaattaaagctgaaaataagctttttgcctggatttttatggcggcttacgccgccgttgaaactttaatcatcacccgcgacgcggatcaccactttgccgaagtttttacccttcagcaagccgataaacgtctgtggcgcattctctaaaccatcagtaatatcttcgtggtagtggattttatcctctttcacccattgccccatcaccttctgaaactcatggatgcggtgaccataatcctgagcgataataaacccttgcaagcgaatacgttttttcagcaccgttgccatcaacaggggtaaacgatccggaccgggtggtagctctgtagcgttatagctgctcactaagccacaaacgggaatgcgcgcagatgtattaagtaatggtagcactgcatcaaataccttaccgcccacgttttcataatagatatcaataccttttgggcacgctttcaccagttgttcggcaaaatcatccgcgtggtgatcaagacaaacatcgaagcccagcacctcgatagcatggcggcatttttccgcgccaccggcaacccccaccaccctgcaacctttaagtttgccgatttgccccaccgttgctcccacaggacctgtcgccgcagctaccaccaacgtttcgccctctttaggctgaccgatatccagcagccccatataagcggtaaagcctggcatccccagcacacccagcgaccacgatggattttgcggatgatcgccaagtttcaccagatcatcaccactggatatgtcatagtcctgccatccactgtagcccagcacccagtcgccaggctgataattaggatgattcgactccacaacacggctcaccgtgccgccgaccatcacgccgccaatatcaacaggcggtgaataagatggctcatcgctcatacgtccacgcatatacgggtccagggacaaataaactgtgcgcagtaacacctgtccttcacccggtgtggcgacatcatcttcttcaagacggaaattctccggaaccggtgcgccatgtggacgcgaggccagaacccaacgtcgattacgctgcttttgttgccccataatgctctcctgtgcttttggcatgaatccatcaatagtagcaggctcacgggattggttttgtttgcagccgtcacatcccctctgcaacacgcaataatttcatcgaggaatccgttgcttcgggctgttttcgatagtattgataacatcatcatcattattttatcgaggccagacatgtccatccgttttgcccgcaaagccgattgtgctgccattgcggaaatttataaccacgccgtgttgtatacggcggctatctggaatgaccaaacggttgatgcagataaccgcattgcctggtttgaagcgcggaccatagcaggttatccggtgctggtaagtgaagaagatggcgtagtgacgggatatgcctcgtttggcgactggcgtagtttcgatggttttcgccataccgtggaacattcggtttatgtccatcccgatcatcagggcaaaggtctggggcgtaaattgttaagccgattgattgatgaagcgcgggattgcgggaagcatgtcatggtcgccgggatcgaatcgcaaaatcaggcctcgctgcatctgcaccattcgctgggatttgtcgtcaccgcacaaatgccgcaggtgggcactaaatttgggcgctggctggatctgacatttatgcagttgcaactcgacgaacgcactgaaccggacgcgatcggatgaatcagtcgctcacccttgcttttttgattgccgccggaattggtctggtagtccagaacacgctgatggtgcgcatcacccagacctcctctaccattctcatcgccatgttgctgaactcactggtggggattgtgctctttgtttctattttatggtttaaacaaggcatggcggggtttggcgaactggtgtccagcgtgcgctggtggacacttatacccggcttgctgggatcgttttttgtcttcgccagtatcagcggatatcagaatgtgggagcggcgacaactattgcagtactggtcgccagccagctaattggcggtctgatgctggatatcttccgcagtcatggcgtaccactacgggcgttgttcggcccaatttgtggcgcaattttacttgtggttggcgcctggttggtagccagacgctcattttaatcagaggatggtgccgcctttggttaactgttcgtggcgcgcttccatatcttctttatgcttgcgaccgtgatgagcaatagcggtgcgcaaacgctgctgctgggtgtagcgatcttcccgacttaactccgcgtcatcgctcagggcgattaataattcgttcatatgggcaatgacgctctcttcaatcgcggcatccacgcgcgcgatgacttcatccagatgcgacatactttctccttagccacttgtgaaatttatcgattcatccaaatgatataagtctgcgtggtgccgtcaagccagtgagtaagatttaaaacagtgaaaacaacagcgccaccgggaaactcatcggccatgttgcccccaccagaaaggcgcttaagaaacggatgcgtttcttatcgtgagaaagaaaccaggtgataagaaatgcgattgctgccataaccgcataaaaaacaagcatgtgttgatagagagacatgtacgggcgtccagccagatgaataaaacgcgcgcaaatatgcgtcattttttgacgtgcatcaagttttttcaccagtttgagaaaaaatcatcaaacagcaacttgcccttattcatcttcagaatgagtattattgcggattttcttaacccgtactatacacataggggcaatgataaaaggtggcaaaaatgaatgtttccagtagaactgtagtactgataaatgtctttgctgctgttggtttgtttactcttatctctatgagatttggctggtttatttgatgtagtgattttgcacgcagcacgtactgtcagagaaatcagtgctctgacagtacgcaagatcatctcatactcttacgatctgcaatattatccttaatgtttaaccatgacgtggcggacgacggtgtaatcctccagcccataaagtgacatatccttgccgtaaccagaaagtttctgtccaccgtgcggcatttcacttaccagcatgaaatgggtattgacccaggtacaaccatattgcagccgtgcgctgacgcgatgcgccctgcccacatctttcgtccataccgaagatgcaagtccgtactggctgtcattcgcccagttcaccacctgttcttcgttgtcgaagagcgtaacactcactactggaccaaatacctctttttgcacgatggcatcgtcctgtaatgcgccagccagcagcgtcggcgcatagtaatagccattacccttgcgcttttcaccgccagtgatcactttgatgtgccctgtcgctttcgcctcttctactgccttgctgacgcgttcgagatgcgccagcgagcttaaaggtccaagctccgtagactcgtcatccggcgcaccagattttaacgttgccaccgcagcacccagtttttccaccagcgtatcgtaaatgcctttttgcgcgtagatccgacaagccgcagtacaatcctgtccagcattgtaatagccaaatgtacgtacaccttcgaccactgcttcaatatccgcatcatcaaaaacaatcactggcgctttgccaccaagttccatatgagtacgcttaatggacgacgcggtatggctgatgatgtgctcgccggtggcgatagagcccgtcagcgacaccatccgcactttgggatgaccggtcagcggatcacccaccgttttgcctctgccaaacagtacgttaatcacgcctgccgggaagatatctttcgccagctctgccaacttcaacgcggtcagcggggtaatttctgatggtttaagcactacgcagttccctgccgccagcgccggagccagtttccacgctgccatcatcagcggataattccacggtgcgatagaagccacgacccccaacggatcgcgacggatcatcgaagtatgaccttcaagatattcacctgccgccagaccattcagacagcgcgccgcacccgcgaaaaagcgaaaaacatcgacaatcgccgggatttcatcattgaacgcactatgcagcggtttgccacaattacgggactccagttcggcaaaaacctgaccattttcttcgataacatcagccagtttcagcagacattccgcacgcactttcggcgtggtttgcccccattcggcaaatgctgcatctgccgcgcgcacagcagcatcgacctgctctgcggatgcctcggcaatctccagtaaaacgtcccccgttgccggattatagacaggctgtttttccccttcgccgctaaccagttctccgttaatcagtaacttatgttgcatagcatattcctgtatcagtggttattgaccattgtcgccttcgcgggttagccaccaggcccccaggatcggcaaggttgttaccaacataaccagcagtgccaccacgttagttaccggtacatcacgcggtcgcccaagctgattgagcaaccacaacggtaacgttcgttcatgacctgccgtaaaagtcgtaacgatgatttcatcgaacgacaaggcaaacgccagcattcctcctgccagtagcgccgaactgagattcggcaacactacgtagcggaaggtttgccagccattggccccaagatccattgacgcctcaaccagactccacgaggtgcggcgaaaacgggcgatgacattgttaaacaccaccactacgcaaaaagtcgcatgaccgaccacgatggtgaaaaatcccggctccagattgatggttttaaaagcggttaatagcgccagaccagtgacaatgcccggcagcgcaatgggcagcagcagtaacagcgaaatggcgtttttgccgaaaaagtctcgtcgccacagcgcggcagctgccagcgtccctaacaccagcgccattaatgtcgccagcgccgccactttaagtgacagtgtcacggcatcaagaatatcactacgctgtgctgccacgctaaaccagcgcagcgtcaggccctgcggtggaaaactaaacgccgcatcttcagtgttaaacgcataagcggcgataatcaggatgggaaaatgtaggaaaaccacgccgccccaggccgccagtttgaggaaaaacggtgcgcgttcagagtgcatcgaacgctcccagacgtttcacgaacgccaggtacagtgcgatgagaacaatcggcaccagggtgaatgccgccgccatcggcatattgccaatcgccccctgctgggaataaaccatattgccgataaaatatcctggaggaccaaccagctgcgggacgataaaatcgcccagtgtgagtgagaaggtaaagatagagccagcggcaatacccgggattgccagcggcagcaccacatagcgaaaggtttgtcgtggacgtgcgccgagatcagccgacgcctgcaacaatgacggcggcaaacgctcaagcgccgcctgaacgggcaggatcatgaacggcaaccagatatagagaaacaccagaaagcgccccagcccggaagttgacagcgtatttccgcccaccgcaggtaatgtaaggaacgcagtcagcagtggttccagcccaagatgttgtaaaaaccactgagccacgccatcttttgccagcaataacgtccaggcataggctttaacaatgtagctcgcccacatcggcaacattaccgcaatataaaaaaaagctttcattttcccgctggtatagcgcgccatataccacgccattggaaaagccagaatggcgctggcgatagtgactgccacagccatagtcagcgtgcggagaatgatgtcgtaattcgccggattagacagcgcacggatattcgccagcgatagttccggcgttaccgacatggtgaaatcgtcaaaagtataaaatccctgccataacagtgtcagcagcgagccgaaatagacaatgccaaaccacattagcgggccaagcagcagtaaaaacagccccagccccggattacgccagaagaaaccggacaccttacccagacctggacgtgaaggtgattgcaatacattcatcgccattcacctctcctcaaccagcggcaccatcacatcacgcgaccaggaaaccatcacctgttgtccgggcgtgagcgtggcaggcagttcttcgcctgtcatattggcctgactcacaagcagtttttcaccgccgttcaatttcagttcaaaacgagttgccgcgccctgatattgcaccgcctggatcgtgccattggcctgcagttcaccaggggtgttgaggcggatatgttccggtcgcagggcgaagcttcccgtcatgccacaaagtttctctgccatcagtccatcaaaaacgttggatgtcccgacgaatccggcaacaaacggcgtgcgcgggcgcatatagagatcgcgcggggaatcgacctgctcaatgcgtccattattgaaaaccgccacacgatcggacatcgataacgcttcgccctgatcgtgggtaacgaagataaaagtgataccgagagactgttgcagttttttcagttccagctgcatctgctcacgcaatttgagatccagtgcgccgagcggttcatccaacagcaatacgcgcggttcattcaccaatgctctggcgatagcaacccgctggcgctgaccaccagaaagttgtgacggtttacgttgatgtacaaaccccaacgccactttctccagcgcctcttgcgccattgcgtgccgctgctttttattcacgcctttgaccatcagcccataggcgacattgtcaagaatcgacatatgcggaaatagcgcgtagtcctgaaagacagtattcacgtcccgctcccacggtggcagattgctggcgggtttaccaaagatagagatagccccgccggaaagctgttcgaagccagcaatcaggcgcaggcaggtggttttgccggagccggacggccccagcatagagaagaactcaccatcttttatcgcaatactgacgccatctactgcgcgcacgtcaccgtacaaccgcgagacgttgtcaaactccactgcgtacgtcataaagcaccccagcgaagttagcgaccgcccataatggcaatgtaatcctgcgtccagcgactgtagggaacaaacttgcccccttctgctataggcgttttccagaaggcgattttgtcgaaatagttaaaaccgttggtttcacaacctttttcgcctaataacggactggctttacacccttccggcactaccggtaacgagccaaaccaggccgccacatcgccctgcacttttggcgttaatgaccagttcatccatttgtaggcgcaaaccggatgtttcgcttcgctatgcagcatggtggtatcagcccaaccggtaacaccctccttcgggaaaacggtagcaacaggctggccttcggctttcagggcgttggcctgatagggccaggcactggaagcaaccacaccctcgtttttgaaatcgctcatttgcacggtagtgtcatgccagtagcgatggatcaaactgtgttgagcgcgcagcactttcagcaccgcctggtactgttcttcggttagttgatacggatcgctgatgcccaactgcggctgagtggctttaacgaacaacgcagcgtccgcaatgtagatagggccatcataagcctgaacgcggcctttattgctcttgccgtccggcagattttgctcaacaaaaaccacttgccagctatccggcggcgtcgggaaggttttagtgttgtacatcagcaggttcggcccccattggtaaggtgtgccgtaaactttgccgccaacattaaaccagtcgcctttaaccacgcgcggatcgagcgttttccagttgggaatcaaggcggtattaatcggctgcacgcgtttgcccataatcaaacgcagcgaggcatcgccggatgccgtaaccagatcgtaaccccctttggtcatcagactgaccatttcatcggaagtcgcggcggttttcacattcaccgcgcagcctgtctctttttcaaattgcgttacccagtcgtattgtttatcagtttgtccgcgttcgatgtatcccggccaggcgataatatccagtcgcccttccggtttatctaaattggtaggtggttcggcggcgtgagcgttcattattgtcatggtgagcgcacacaggctgctgcgggcaaatgtcttgctcataaggtcttactcctgtcgtaattaattgttcagccgccgtgccgtaaaaatatctccttgtttaaccatagacggcggcttgcaggcacaccttcgcccctgagaaaatttaatcaggttgtgagctaccgcgcattatgccgtctgtaaggttatcttctggagtatagacaaggggttaggaaatatgactgctattcgaaattcatattacccaatctaagaggaattaaattaaacgctattacagccgttcttgaataagtttgcctaattgttttaccgcctgttcttcacgttctccccactgccacgcggtattaaaacgaaaaaaacgtgaccagttttcaccggtagaaaacattttacccggcgcaatactgatatgatgcgtcagtgccgccaggcttaattcgccggcatctaacggctcggggagctccagccagagaaaataaccgctgtcactatgatgaattttaacttccgcaggcagataacgcagcagtgcctgccaggcacgttgtttacgttccgcaagctggcgacgcaggcgacgaagatgggcgtcgtatcggcgcgtggaaaggtaatccaccagcgcaagttgcatcggtgagctggtggaaagcgtactcatcaactgcaagcgttgaattttacgtgcatgttttccggcggcgacccaaccaatacgaaaaccaggcaccagacatttcgaaaacgaagagcaatgcaaaacgccatcgtggcgatcccacgctttcgcaggcagcggtttttcccgtccaaaataaagttcgctgtaaacgtcatcttcaatcagcgttacgttgtactgattgagtaacgccaccagttgtgcttttttttgcggcgttaaggtaaatccgagtgggttctggctattagtcatcagccagcacgctttcaccggataatcctgcaacgccagttccagcgcctgaagatcgatcccttctttaacatccgtcgccaccgataacgccttcagccgtagccgctccagcgcctgcaacgcaccgtagaaacaaggattctctactatcacccaatcgcccggttcagttaccgcttgcaaactgaggtttaatgcctctaacgccccggcagtaatgacaatttcatcaggagaaatggtgatgccctgtaaggcatagcgacgagcaatagcctgacgcagttctgcgtttcctggcggtaagttttcaatcacgctcatcgctgtggcggttttgcttacctgcgccagcgagcggtttagttgttggagggggaaaagtcgcgggtcgggaaaggccgaggcaaacggaacgaccgacggatcgcgactggcctgcaacatatcaaaaatataagtgttgatatcgactgcttcatctcgagtgactggaatgactggcgctttcggcatttttattgcctgtggcgcaacgtaataacccgactgcggtcgtgcgataatatatccctgactttcgagcaactgataggcatggctgacagtcataaagctcatgcctgaaagcgccacctggtcacgcaacgaaggcaaacgatcgccgggttgccagatacccgacgcaatctgctcgcgtaattgttctgcaagctgctggtattttttcattatcgaatcgtaattatgtgcagatgattcggcagtctatatcagttgttaaaaatgacaacttttcgttaactgtaattaaaccatcaccagcgataactctttgccaagcgcctttgccgcaagctggacggcgtcgatttttgtcgcatggtgcaagttaaataggcgagtaatctcctgtttaggtttccctaatataatgcccccacaataacacgagggggtacaacaatgttcaatatcatgattcgtaaatttggcgagatgactttcgagaaagctggtgttgctcgtaccgaagaagaagcaatggccttagttctggtagcactgagatcatcacctgagattatcgacgctgaatatgtagccgcagaaggtgagattaacgagattaaagcggtggctaaggaattaggtgttaaaggtttccgtaagctgagactatcccgcgagacttatgtcattggacagcaaggacaatacctagatgagaatagcgcgattattctactgaataagatcacccgctacggttggaagattgagcaatataaaacgtgtttcgaattatacgaaaaaggtttgctggatactctgaccatcgttcgcgcttaattaatttctaatttggtgggtgcaattcccaccgctttttaaactggagaatcaaacatgttagcttttatctcattcgtgggaggtagtctcacaactattattagtctttcttatcttgtcgttagtatggggtgagcaatgaaacaatttcatgatggcatttcatctaagacattcaagaaagaatatagcggattgtgtattaactggattgatttgattggtgcggttgtatttggtctggtaattagcatcaacttttaacgatataaatatatcgtaattcattcaaagaggattcaattatgaaaaagattatcgctggtgttgttcttgctctgggtttggttggtgctgcaaatgccgaacaatatgtacagggtgatagtgtcaagcgtgctgccgttgcaccttctttaaatcaactgtgtactgaattagcacaggttgccggagttggtgacgatgacgactttattactgcgtgtgtatggagtcatatcgaggatattaataaacgtgatgcaaaactaactggaaagaaatattaatgacttactaatcaatgcccctatcgttataatacacggtaggggcgtttttgtttggaaatggtatgaaaactaaactgtattcgtatattcgcttctcgtctatgcgtcagaatgatggttcgagttatgaacgacaaatcaggatggcgagagaggttgcggcaaagtatgaccttgaactggtaaatgattatcaggatctgggtgtatctgcgtttaagggtgctaactccaaaacaggggcgctatctcgtttccttgatgcaataggtagatccgttcctgttggtagctggctattcattgaaaacttggaccgtttatcccgtgccgatattgtcagtgcgcaggagttattcctttcaatcatccgtaggggaataaccattgttactggcatggataacaagatctactcgctggatactgttaccgctaatccgatggacctgatgttctccatccttttattcatccgtggtaatgaggaaagtcagactaagcgcaatcgtactaactcaagcgcactgattaagattaaagcccatcaagaaaatccccagaatccggcagttgcaatcgaggaagttggaaagaatatgtggtggactgataccacttccggttatgtgctgcctcatccggtgtacttccctgttgttcaggagattgtggaattacggaagaatggacgttcaaccgccgaaatactggatcaccttaacgagacatatgcaccaccaccagcggttagtaataagaagcattcaaaatggtcacgggcaatggttgaaaggttgtttcatacccgcgctttgattggtatcaaggaaatatctgtagatggcgttaactatgagttaaaggattattaccctcgtgttattgatgaccctacgttctatcaccttaagaaaaatattggtgctagagcatggaactttggagacaaggaagaagttaaaccgatccccctgcttagtggtattggcctattgaaatgtgatcattgcggttgcgctatggttaaagtgaagggaacgaacaaacgttctgaccagtatcgttatacatgtgatgcgacccgttcacgtagacttgattgcgagcatccaaactggagttttcgaggtgatcaattagagaaagctgtattgcaattgctggctgataaaatctggattgctgaggacaaggctaatccggttccggcgttgaaagtacaggttgatgaaatatcacgcaagattgataacctgattgccctttctgctatgacaggagcaacgaaggaactagccgatcagattactaccctcaatagcgagcgtgaaacactctacaatcagattaagatggcagaagaggaaatgtattctgtggactctcaaggctgggagaagctcgcagaatttgatttagaagatgtttataacgaggaacgactaaaggtccggtttaagattaagcaagctctaaagcggatcgggtgtagcaggattgacaggaataaaaacttgtttgtactggaatacatcgatggaaagacccagagagttgtaatagaaaattcaagaggaacgaggaaaggacaaatctttgtcgatttgaagaccatcaatgataggcagattctggagagtaacgggcttgttctgcatccatgtttagacatgctgacagataaagactggaaaccagaagaggaaataccaggtccattacaggaatttggaatttaagcggcctaaatcgacgtataacgagctaaacgctttaaggggtacattcgtacccctttttaatttaattgcgttaggcagcgtctaagagagtattaaagtattcatccattaaatcaggactgtcgtcatcaatacagaaaaattctggtttattgatgccgtagaagtgagtatgtagcttgaatgtatcctcatcaaatacatctttcggagatacccacatattagcctcgtccggttgattggttaggtagtcataaaccagttgctgtaagtacggcaactcatcaatagtcagagtttccgaccatccatccttgaaatctttgtagggtgcggcgtgagtcttgaagcgttgttttacttcatgctctaaatcggcagctttccaaccatcctcaaactcatgagtaaagattaagcggtgagtgaagttgctctttctggtttgctctctcattcgttcttctggttttcgggtagtgattccaaatttaataaatttgtcatctaataattg

SEQ ID NO: 239 - DNA, 20275 bp, Escherichia coli
  source 1..20275: mol_type = genomic DNA
ttggcaaggcgatatcattccattacgctaggctttttcggcctggagcatgccatgttgcgcattatcgatacagaaacctgcggtttgcagggagggatcgttgagattgcctctgttgatgtcattgacggaaaaatcgtcaaccccatgagccacctggtgcgccccgatcgtcctattagtccacaagcgatggcgattcatcgcatcaccgaagccatggtcgccgataaaccgtggattgaagatgtgatcccacactattacggtagtgaatggtatgtcgcgcataacgccagctttgaccgccgcgtactgcctgagatgcccggtgagtggatttgcactatgaaactggcccgtcgtttgtggcctgggatcaagtacagcaatatggcgttatataaaacacgcaagctcaatgtacagacgccgccgggcctgcatcatcaccgcgcgttgtatgactgttatatcaccgccgcgttgcttatcgatattatgaacacctccggctggacggcagaacagatggccgatatcaccggacgtccgtcgttgatgacgaccttcacctttggcaaataccgtggcaaagcggtttccgacgttgccgaacgcgatccgggctatctgcgctggttatttaataacctggacagcatgagcccggagctgcgtttaacactgaaacattatctggaaaatacttagtccgcaggcgtagcgggtaatgttccctgcgccagcgcgaccagaaaagcatattccatcgctacgccttcgtacgatttaaagcgaccagatttaccgccatggcctgagtccatgtcggtacagagcaataaaagatggtcatcggttttcagctcgcgcaatttagcgacccattttgccggttcccaatattgcacctgagaatcgtgcaaaccggtcgttaccagtaaatgcggataagcctgtgcggtgacgttgtcatatgggctgtagcttttcatgtactcgtaatattgcggatcctgcggattcccccactcttcaaactcaccagtggtaagaggaattgattcatcaagcatcgttgttacaacatcaacaaacggtacctgggcgataacgccgtggaataattccgggcgttgattaattgcaacgcccatcaacatgccccccgcactcccgcccatcgcataacaaagcgaaggagagccatagcccagttttaacaatgcatcgcaggcatcaagataatcattaaacgtatttttcttcttcagaaattttccgtcttcgtaccattgttgccccagctcaccaccgccgcgaacatggacaatggcgtagacaaagccacgatctaacaaactcaagcggctaaaactgaaatcggcatcaatacttgcgccgtaagaaccatagccatacaccagcaacgggttgtgtcctttgcgaaaatgtttgcgatggtagaccaacgaaaccggaacttcgacgccatcacgggcgactatccacaggtgttcactgcggtaattcgccgcatcaaaaccgggcacttctgtttgttttaatacacggcgctcaccggtatccatatccagttcaaacaaagtgtctggtgtggtcatggaagaataaccataacgcaatcgcgcggtttcaggttctggattgtaggcaatccaggtcacataggctggatcatcaaaggcaataccaatgacttcccgggtcttgcggttaatttggcgcaaactggttaacccgcgctgacgctcttcaaccaccagccagtcggtaaacagcgtaaacccttccagcatgatgttttcgcgtggcggaattaactcttcccactgttgctcatcacgcatacgggtacggtataagccaaagtttttgccgtggcggttggaacgcagataaaaacgatgctggtagtgatcaaggctgtattcgtgatctttgcggcgcggcagaaaaacaaacggctcggcatcggccatttccgcgtccagcaggcgaacttcactggtggtggcgctggccaaatgaatgactacatagtgcttcgaggtcgttttatgcaggctgacgtaataggtatcgtctttttcttcgtagatcagtttatcttgcgatgctggcgtaccgatggcgtgacgccagacctgataaggcagcagcgtcaccggatgcttgcgaacatagtagaaagtccaggagtcatttgcccagacaaagctgggttcaacgttatccagcagttccgggtaccagttaccagtttccagattacgaaaacgaatgccgtactggcgtcgggaaagaaaatcttctgccagcgccataatggtgttatcgggcgtaatcgccattccgcccatcgaataaaactcactatgagctgcgcgcttattggcatcgagcaatgtttcccactcatcccactcttcactgaatgccgattgacgctggtagatagcatattcacagcctggttcataaatatgccgatagcggtagccatttttgatgtagggcgcagaaacttctcgttgcggaatgcggtcgatgatttcctttaagatgcgatcctgcaaggcttgttgtgaggccatcacccgatgaccgtaactattttcttgttgcaggtagtccaggacttctggctgagaacgcgtatcgtcccgcagccagtagtaattatcgatgcgcgtatcgccatgaagcgtcatggcgtggggaatacgggcggcttttggtagcatgttattgttctttctggttgaaacatcttataagggtggcaaaactcaccggggatgcaagcgaaacaggggagtcattgcttagatgatgacaggtaatggcgcggatatcgaatgttatgcagacagagaaaatcagcctgttcaaatggctgtgcgattctggatagcccgaaatagtcaacttcaggctatccagagagcggaattattccgccaaagtgcgtttttgctgttcgagatcgcgttcaatgccgtcacgaacatcctgggggattttcagcgcgtcacccagtgcattcaggtaactgcgttccataaaatggtcaatatcaatagccgcgcaactcaggaaatagatttccagcgcctcttcttcattgcggaccccggtagccaggcgttgtggatccagcggttgttcgattgcctgctcaatgagtacacgcccctgctcttccacgccggcttcacgcaattgctggtcgattgccgcacgttctttggcatcaatatgaccatcacttttagcggcaaagaccagcgcaaggatcaaacgttctgtacgctcatccagcggcgtactttgcgcgccaaactgcggttcgtcctgatgcgccgcgcgaattttatctttgtatttattccacagcaccgtacccgctaccgctccgccgccaaccagtaacgcgttggtgccatatttcgtaagaagtttacgtgctgatttatttgcgaccagcagcccagccagtccgcctaatgcgcctggcactaacagtttgcccaatccctgatccgcagacgaggaggtagaagaactgctttgcccaagcagggattgcagttgatttaaccagttagccatatttgctcctcaataaccatttttagtgcctgtagcatagcggatgaggatgtcagaaaatgtatatcgagacaaaagatgcgcaaataagcggggcggtaggccgttattcaaagaaattcgcgccaggtaaggtatttactgtatatcaggtgataagggtattttaggtgaaagtagtttgtcgttttgagtggcattgtttgatgctgattgcccgatgcgacgctgttgcgtcttctcaggcctacgattgtggtgcgttctggggcggacaaggcactcgcgccgcatccgccaacggtcaatcgaattatcagaagccattaacgccgctgatattccgccattcccgctttgcagtccacgctgacctggtaatgaatatcggcacttttaccacgcacggttagcggtactgaccatttatcatctttaccctgaatgtcctgcaaactgacccaagccacgggatcggcctgaccgacaattttttgatcatctgcccagcgcgccacgcgattttgttgataatcacgttttacgctcgcggcaattccggcagcatccagaccttcacactttgggaaagtgaccgacttgctggtttcattattggcagcgaaaactgatgcgcaggcagaaaccaacaacagccctaaaaacgcccctctttttttcatgtttttctccatagcacaatgattcaggagaaagcatggtacaaattgtcaggagcgcaagttgcttcaggccgcgtgtgaggcatcttcctcttcggattcagcaccgacgacctgtggggacggtaatttgccggttttcagaatggtgctcagcacatctttttgttctgccagccatagcgaaagggcttcacgttgctcgtcttccatttgcactggagaatttgtcagccaggtgtcaagcagatccgccgtatcaagcattttatcataagcatcggcttcctttttgctggtaaacgacattttctcttcgccctcacgaatgactacgtatttaacttcaaccgccatttgcagcctctcataataactgtgattttatacagtatatttcttttcggttgagaaatcaacatcagcaataaagacacacgcaaacgttttcgtttatactgcgcgcggaattaatcaggggatattcgttatgacgttattaggcactgcgctgcgtccggcagcaactcgcgtgatgttattaggctccggtgaactgggtaaagaagtggcaatcgagtgtcagcgtctcggcgtagaggtgattgccgtcgatcgctatgccgacgcaccagccatgcatgtcgcgcatcgctcccatgtcattaatatgcttgatggtgatgcattacgccgtgtggttgaactggaaaaaccacattatatcgtgccggagatcgaagctattgccaccgatatgctgatccaacttgaagaggaaggactgaatgttgtcccctgcgctcgcgcaacgaaattaacgatgaatcgcgagggtatccgtcgcctggcggcagaagagctgcagctgcccacttccacttatcgttttgccgatagcgaaagccttttccgcgaggcggttgccgccattggctatccctgcattgtaaaaccggtgatgagctcttccggcaaggggcagacgtttattcgttctgcagagcaacttgctcaggcatgggaatacgctcagcaaggcggtcgcgccggagcgggccgcgtaattgttgaaggcgtcgttaagtttgacttcgaaattaccctgctaaccgtcagcgcggtggatggcgtccatttctgtgcaccagtaggtcatcgccaggaagatggcgactaccgtgaatcctggcaaccacagcaaatgagcccgcttgcccttgaacgtgcgcaggagattgcccgtaaagtggtgctggcactgggcggttatggtctgtttggtgtcgagctgtttgtctgtggtgatgaggtgattttcagtgaggtctcccctcgtccacatgataccgggatggtgacgttaatttctcaagatctctcagagtttgccctgcatgtacgtgccttcctcggacttcctgttggcgggatccgtcagtatggtcctgcagcttctgccgttattctgccacaactgaccagtcagaatgtcacgtttgataatgtgcagaatgccgtaggcgcagatttgcagattcgtttatttggtaagccggaaattgatggcagccgtcgtctgggtgttgcgctggcgaccgctgagagtgttgttgacgccattaaacgcgcgaagcacgccgccggacaggtaaaagtacagggttaaacccggcaaaaaaacgctacaaaaatgcccgatccgcgatcgggcattttgacttttacagcttagcgccttctacagcttcacgcgccagcttagtaatacggtcgtaatcgcccgcttccagcgcatctgccggaaccagccaggaaccaccgatgcacagcacgcttttcagcgccaggtagtcacggtagttagccggagaaataccacctgtcgggcagaaacggacctgggagaacggacccgcgatcgcctgcagggctttcacgccgccgttagcttcagctgggaagaatttgaactctttcaaaccgtagtccatacccagcatcagttcggaaacagtgctgatccccggaatcagaggaatagtcccttcggtagcagctttcagcagcggctcggtcagacccgggctaattgcgaactgtgcacccgcttcggtgacttctgccagctgctgtggattcagcaccgtaccggcacccacaatcgcttcaggcacttctttggcgatagcacggatagcgtcaactgcacactcggtacgcagagtcacttccagaacgcgcaccccaccagcaaccaacgcttttgccatcggcactgcgtgttccagtttttttaccacgataaccggtacaaccgggccggtggtcaggattgattctgcacttgttttccagtttttcatcagagttttctctcgcctgattacaaatttgtcgtcttaaaaagtgatacaggttgcgccctgttcggcaccggacagtttttcacgcaaggcgctgaataattcacgtcctgtccccacgcgtgacgcgctcaggtcaggaatgtgcggttcgcgagcagccagttccgcttcgtctaccagcagcgtcagttcgcctgtctgtccattcacacgaatgatgtccccgtcgcgcacttttgccagcagcccgccatcgtaggcttctggtgttacgtggatagctgacggcactttacctgaagcgccggagagtcgtccatcggtaactaacgcaattttgaaacaccggtccaataatacaccaagtggcggcatgagtttatgtaattctggcattccgttcgcttttggcccctgatgacggacaacaacgacacaatcgcggtccagcaaacccgcttcaaaggccggcataacgtcatgctggctttcaaaaacaaccgctggcgcttcaatcacctggttctcaaccggcacggcagaggttttcataaccgcacggcccaggttaccgcttaacacttttgtcccaccatgatgagagaaaggttgttcgaaggaagcgatcacattgctgtcgagtgatttttccgccccttcccgccagtccagttcaccattattcagccatggttcaagggtataacgagacagaccaaagcctgccaccgtattgacatcttcatgcagcaggcctgctttgagcagttcacgcaccagaaccggtacgccacctgccgcctggaagtggttaatatcggccggaccgttcgggtagagacgtgccatcagcggtacaacatcagaaaggtcagagaagtcatcccagttaatctgaataccggccgcgcgcgccatcgccaccaggtgcatggtgtggttagtggaaccaccggtcgccagcagtgcaacgataccgttcaccaccactttctcatcgatcatcttaccgatcggcatccattcattaccattaccggtcatgcgtgtaacctgacgcgcagcggcagcggtcaaagcatcgcgcagcggagaatccggatgaacaaaagaagagcctggcaactgcatccccataaattccaccaccatctggttggtgttggcagtaccgtagaaagtacatgttcccggcgcatggtaagacgcggcttctgactccagtaaggccatgcggtccactttaccttcggcataaagctggcgaatacgcactttttctttatttggcaaaccgcttgccatcggtccagacggcacaaacaccgcaggcaaatgaccaaacgacagggctgccatcgtcagacccgggacaatcttgtcgcacacaccgaggaacagagcaccatcaaacatgttatgggacagcccgaccgccgcagacatcgctatcacttcgcggcttagcagcgacaattccattccatcctgcccctgggtgacaccatcacacatcgccggaacaccgcccgcaacctgaccaaccgcattcgcttcatgcagggctttacgaatgatttctggatagtgttcataaggctggtgcgcggagagcatgtcgttataggaggtgatgatggcgatattgttacgcaacatgcttttcaaagaggctttgtcttctggctggcaggcagcgaaaccgtgtgccaggttaccgcatgccaactgcgaacgatgaacggtcgaagttttcgcttgttctatccgggcgagataagcagagcgagtctcgcgcgaacgttcaatgattcgatttgttacgcgtaacaattgtggattcataaaggctcctgaaattgagttgtcagagcaggatgattcacaacgcgtttcattcagaggatttatgactgaaacgcctgtaaccggagctcatagggcaaaaacgtttcagtcagtgtaataaaaaaagcctcgtgggtgaatccgcacgaggcctgaaagtgtaaaaattgttctacaatctgtgcaagatcatgttaccggtaaaataaccataaaggataagcgcagatattactcaaactcattccaggaacgaccatcacgggtaatcatcgccaccgaggcaacgggtccccaggttccggcctgatacggtttcggcgcatcattgtccatcgcccacgcctcagtaatggagtctacccatttccaggcttcttccacttcgtcgcgacgaacaaacagtgcctgaataccacgcatggtttccagcagcaaacgttcataggcatccgccagatgcgtctgattaaaggtttctgaatagctcagatccagcttggtgatttgcaggttatgtttgtggtcaaggccaggaactttattcagtacctggatatccacgccttcatcaggttgcagacggatagtcagtttattctgcggcagatcctgccacgattctttaaacagattcagttcaggtgttttgaaatagaccacgacttcagaacatttggtcggcagacgtttaccagtacgcaggtagaatggcacaccggcccagcgccagttatcaatgtcgacgcggatcgctacgaaggtttctgtattgctgctcttgttcgcgccctcttcttccagatatcccggcacttttttgccctgggcgaagcccgcagtatattgcccgcgtacggttttttcgcgtacgttggagcggtcgatgcggcgcagagacttcagtactttcactttttcatcgcggatgctgtctgcgctcaggtcagacggcggagacatcgcaatcatgcagagaatttgcagcaggtggttttggatcatatcgcgcatctgaccggctttatcaaaatagccccagcgcccttcgatccccacttcttctgccacggtaatctcaacatgatcaatggtgcgattgtcccagttattcacaaacagggagttagcaaaacgcagcgccaacaggttcagcaccgtttctttaccaagatagtggtcgatacggtaaacctggcactcctcgaagtattcgccaacctgatcattgatttcctgcgaggtcgccagcgacgtccccagcggtttctccatgactacgcgtgccggtttagcattcagtttagcctcgccaagccctttgcaaattgcgccaaaagtgctgggcggcatggcaaagtagttaatggtgatacgatttttttgatccagcatcgcgccgagacggctgaatgcagcagtgtcattgacatcgagattacaaaaatccagacgtgcactcagggtgtcccataaaccttcatcaatggtttctttcatgaaagtttcgagcgcctcgcggacaactttggtatatgccgctttatcccagtcagcacgccctacgccgataatccgggtgtccgggttgagctgaccggctttttccagttgatacagggaaggcagcaatttacgacgcgcaaggtcgcctttcgcgccgaaaatgaccaggtcacaggcctgggctgtttgcgttaccgccatgtcattctccttaagttaactaacccggtacttaagccagggtatacttgtaattttcttacggtgcactgtactgcttttacgagcttgcgaaaactgtaaacgcttatccacccgtgcgattacggtaaaagcgcgcaaagtgcggcaaaactgataaaaaaatcatcgttttccattgggtaaaaatctgacactgatcatgttatgaaaaaaaataacaacttttttatctgcttttgtcattaacacagcacacaggcgtaatatctgacaaaactacatttcgatttctttcagtgcggaaatcgtcattacccgtgagtttctttacatcatgaatatgctggaaaaaatccagtctcagctggaacatttgagcaaatcagagcgcaaagttgccgaggtcattctggcttcgcccgataacgcgatccattcgagtattgctgctctggcgctggaagccaatgttagcgaaccgacggtgaatcgtttctgtcgcagcatggacacgcgcggttttcctgattttaaacttcatctggcacaaagtctggcgaatggcactccctatgttaatcgcaatgtcaatgaagatgacagcgttgaatcatacacagggaaaatatttgagtccgcaatggcaacgcttgatcatgtccgtcattcactggataaatctgccatcaaccgcgccgtcgacttgctcactcaggcaaaaaaaatcgcctttttcggattaggctcttcagccgccgttgcccacgatgcgatgaataagttctttcgttttaatgttccggtggtgtactccgatgatatcgtgctgcaacgcatgagttgtatgaattgtagcgacggagacgtggtggtgctgatttctcacactggaagaacaaaaaatctggtcgagctggcgcagctggctcgcgaaaacgacgcaatggtgattgccctcacctctgcgggtaccccgctcgcccgggaagcaacgctggcaattaccctcgacgtaccggaagatactgacatttatatgcccatggtttctcgacttgcacagctgaccgtgatagatgtgctggcgacaggatttactttgcgacgcggtgcaaaattcagagataacttgaagcgggtcaaggaagcgctgaaggaatcgcgttttgataagcagttacttaatttaagtgacgatcgctaaaaacgactgtcactgtcctaatcttatacgacatccgaatgagattaatttatcgccatcgcggcgttatttcattcggatttcatgttcaagcaacacctggttgtttcagtcaacggagtattacatgtccagaaggcttcgcagaacaaaaatcgttaccacgttaggcccagcaacagatcgcgataataatcttgaaaaagttatcgcggcgggtgccaacgttgtacgtatgaacttttctcacggctcgcctgaagatcacaaaatgcgcgcggataaagttcgtgagattgccgcaagactggggcgtcatgtggctattctgggtgacctccaggggcccaaaatccgtgtatccacctttaaagaaggcaaagttttcctcaatattggggataaattcctgctcgacgccaacctgggtaaaggtgaaggcgacaaagaaaaagtcggtatcgactacaaaggcctgcctgctgacgttgtgcctggcgacatcctgctgctggacgatggtcgcgttcagttaaaagtactggaagttcagggcatgaaagtgttcaccgaagtgaccgtcggtggtcccctctccaacaataaaggtatcaacaaacttggcggcggtttgtcggctgaagcgctgaccgaaaaagacaaagcagacattaagactgcggcgttgattggcgtagattacctggctgtctccttcccacgctgcggcgaagatctgaactatgcccgtcgcctggcacgcgatgcaggatgtgatgcgaaaattgttgccaaggttgaacgtgcggaagccgtttgcagccaggatgcaatggatgacattattctcgcctctgacgtggtaatggttgcacgcggcgacctcggtgtggaaattggcgacccggaactggtcggcattcagaaagcgttgatccgtcgtgcgcgtcagctaaaccgagcggtaatcacggcgacccagatgatggagtcaatgattactaacccgatgccgacgcgtgcagaagtcatggacgtagcaaacgccgttctggatggtactgacgctgtgatgctgtctgcagaaactgccgcagggcagtatccgtcagaaactgttgcagccatggcgcgcgtttgcctgggtgcggaaaaaatcccgagcatcaacgtttctaaacaccgtctggacgttcagttcgacaatgtggaagaagctattgccatgtcagcaatgtacgcagctaaccacctgaaaggcgttacggcgattattaccatgaccgaatcgggtcgtaccgcgctgatgacctcccgtatcagctctggtctaccaattttcgccatgtcgcgccatgaacgtacgctgaacctgactgctctctatcgtggcgttacgccggtgcactttgatagcgctaatgacggcgtagcagctgccagcgaagcggttaatctgctgcgcgataaaggttacttgatgtctggtgacctggtgattgtcacccagggcgacgtgatgagtaccgtgggttctactaataccacgcgtattttaacggtagagtaagtacgttgccggatgcggcgaaaacgccacatccggcctacagttcaatgatagttcaacagatttcgaatattctgaagcaaacttgaacttatcatcaggcgaaggcctctcctcgcgagaggcttttttatttgatgggataaagatctttgcgcttatacggctggatttcgcccggtttgcgagttttcagcaattttagtatccaggtgtattgttctggtcgcggaccaacaaaaatctcgacttcttcattcatccgccgcgcaatcgtatgatcatccgcctctaacagatcatccatcggtgggcgcacctgaatcgtcagacgatgcgtcttgccatcataaatcggaaacagcggtacaacgcgcgcacggcacactttcatcaaacgaccaatcgcgggcaacgtcgctttataggtggcaaagaaatccacaaattcgctgtgctctgggccatgatcctgatcgggtaaataatatccccagtacccctgacgtaccgactggatgaatggtttaataccgtcatttctcgcatgcagacgaccgccaaagcgacgacgcaccgtgttccagacataatcaaaaaccgggttgccctgattatggaacatcgctgccattttctgcccttgcgaggccatcagcatggcaggaatatcgacggcccaaccgtgcggcaccagaaagataactttctcgttattacgcctcatctcttcgatgatctccagcccttgccagtcaacgcgcggctgaattttctccggtccgcgtattgccaactcagccatcattgccatcgcttgcggcgcggtggcaaacatctcatcaacaatcgcttcgcgttcagcttcactacgttctggaaagcagagcgacagattgattaacgcacgacggcgtgagctttttcccagtcgtccggcaaaacgtcccagccgtgccagaatgggatcacggaactttggcggcgttaaagcgatacccgccatcgctgctacgcccagccatgctccccagtagcgcgggtggcgaaaggatttatcaaactcaggaatgtattcgctattattttttttcgtttccatgcttttccagtttcggataaggcaaaaatcaatctggtgatagtgtagcggcgcaacttgccccgcaccaaataaaaaaagccggtactgactgcgtaccggctgcgaatggatgttaattaatcaaaccgtagctgcggcacaatctctttggcctgcgccaggaattcgcgacgatcggagccggtcagcccttcggtacgcggcagttttgccgtcagcgggtttacggcctgctggtttatccatacttcatagtgcagatgcggcccggttgaacgtccggtattaccggaaagcgcgatacggtcgccacgtttcaccttctgtcccggtttcaccagaatcttgcgcaagtgcatataacgcgtggtgtagctgcgaccatgacgaatagccacataataacctgctgcgccactgcgtttggcaaccaccacttcaccgtcacccactgaaagcactggcgtaccttgtggcatggcgaaatcaacacctctgtgtggtgcaacgcgacctgtcaccggattagtacgacgcgggttaaagttagacgagatacggaactgtttcgccgtcgggaatcgcaagaatcctttcgccagaccagtaccgttacgatcgtagaatttgccatcctcagcgcggatagcgtaataatctttaccttctgaacgcaaacgtacgcccagcagctggctttgctcacgtttaccatcaagcatttctcgagacattaacaccgcaaattcatcgccttttttcagtttgcggaaatccatttgccactgcatggctttaatcactgcgctcacttcggcgctggttaaaccggcgtttctggcgctggcaacaaagctccccccgacggtacctttcagcagattgttaacccactctccttgctgcatttcgctggtcattttaaaaccgttagcagcagtacggtcataggttcgggtttcacgacgagacacttcccaggtgaggcgctgcagttcgccgtccgcggttaatgtccaggagagttgttgaccgattttcagattacgcaattctttgtcggcagcagccagttgggtgatatcacccatatcaataccatactgattgagaatgctgcttagcgtatcgccagtggaaacaacatattcatgcacgcccgcttcaccggcgattttgtcatccagttcgtcctggggaatggcttcatcttcttgtgcagcttgatcaatcggctcactggcttcaggtaagagcgaacgaatttcgttctgttccagctcaatggttttgacaattggcgtggcatcacggtgataaacataaggccgccagacagcgacggccagagtaagaacggtgagcgaccccaacataacgcggtgtggtcgcggtaaattattaaacgccagggcgacagagcgggctatctgttgcacgtaatcacttcctcattaatctcctttcaggcagctcgcatactggttggctaattgactcaggaattctgaatagcttgttttacccagtttgatattcgtccccaggggatccaacgttcccatacgaacggatgtccctcgtgcgacgctctcaacgaccgctggcctgaactgtggctcagcaaaaacgcaggttgctttttgctcaaccaactgtgttcttatttcatgtaaacgctgcgcgccaggttgaatctcagggttaacggtaaaatgaccaagcggtgtcagtccaaactgtttttcgaaatagccgtaagcatcgtgaaaaacgaaataacctttccccttgagcggcgcgagctcgttaccaacctgcgtttcggttgaggctaattgtgcctcaaaatccttcaggttggcgtcaagtttggctcgactttgcggcataagttccactaattttccatggattgcaaccgctgtagcccgcgctatctctggggaaagccaaagatgcatgttgaaatcgccgtgatggtgatcttcgtcacttttttccgcgtggtcgtgatcatcatcatcgccgtgaatacttttcatcagcagcggtttcacatcttctagctgtgcaatcgttacctgtttcgcttctggtaatttacttaccggtttttgcataaacgcttccatctccgggccaacccaaacgactaagtccgcgttctgtaagcgttttacatccgatggacgcagtgaataatcatgttctgaagcgccgtcaggcagtaaaacctccgtttctgttacaccatcagcaatggcagaagcgatgaacccaacgggtttaagcgaagcgacaacggcggcatctgcggcctgtgttgcacctccccagagagcggcggataatgctgcgaaaagaagcgtttttttatgtaacataatgcgaccaatcatcgtaatgaatatgagaagtgtgatattataacatttcatgactactgcaagactaaaattaacatgacaagtctggtttccctggaaaatgtctcggtttcttttggccaacgccgcgtcctctctgatgtgtcgctggaacttaaacctggaaaaattttgactttacttgggccaaatggcgcaggtaagtcgacactggtacgggtagtgctcgggctagtaacacccgatgaaggggttatcaagcgtaatggaaaactgcgcatcggctatgtaccgcagaagctgtatctcgacaccacgttgccactgaccgtataccgttttttacgcttacgccctggtacacataaagaagatattttgcctgcactgaaacgtgtccaggccgggcacctgattaacgcaccgatgcaaaagctctctggtggcgaaacgcagcgtgtactgttagcgcgagcattgttaaatcgcccgcaattattagtgctggatgaacccactcaaggcgtggatgtaaatggccaggtggcgttatatgaccttattgaccaactgcgtcgtgaactggattgtggcgttttaatggtttctcacgatctgcatctggtgatggcaaaaaccgatgaagtgctgtgcctgaatcaccacatttgttgttccggcacaccggaagttgtttccctgcatccggagtttatttcaatgtttggtcctcgtggtgctgaacaactgggtatctatcgccatcatcataaccatcgtcacgatttacagggacgaattgttttgcgtcggggaaatgatcgctcatgattgaattattatttcccggttggttagccgggatcatgctcgcctgtgccgcgggtccgctgggttcgtttgtagtctggcgtcgtatgtcttatttcggtgatacgctggctcatgcctcattacttggcgtcgcgtttggtttgttgctggacgtgaatccattctatgcggtgattgccgttacgctgctgctggcgggcggtctggtatggctggagaagcgtccacagctggcgatcgacacgttattagggattatggcgcacagtgccctgtcgctgggcctggtggtcgttagtctgatgtctaatattcgtgttgatttgatggcttacttgttcggtgatttgctggcagtgacgccggaagatctcatctccatcgccattggcgtggtcatcgtggtggctattttgttctggcaatggcgcaatttgctgtcgatgacgattagcccggatctggcgtttgttgatggtgtgaaattacagcgcgtgaaattgttgttgatgctggtgacggcattgacgattggtgtagcgatgaaatttgtcggtgcgttgattattacttcgttgctgattattcctgcagctactgcgcgtcgctttgcccgtacgccggaacagatggctggtgtcgctgttttggtggggatggtggcagtgactggcggtttaaccttttccgcattttacgatacgccggctggtccgtcggtggtgctatgtgcggcactgttatttattctcagtatgatgaaaaagcaggccagctaatctatcgctgaacacatttgtcggatgcggcgcgagcgccttatccgacctacggttcgctatctctggctggcctgataagacgcgaacagcgtcgcatcaggcacactgccaatgtcggatgcgtcgcgagcgccttatctgacctacggttcgctatctctcgtaggccggataagacgcgaatagcgtcgcatcaggtacactgccaatgtcggatgcgtcgcgagcgccttatccgagctacggttcgctatctctggtaggccggataagacgcgaatagcgtcgcatcaggcacactgccaatttcggatgcggtgcgagcgaccaatccgacttacggcatttctggcggcgttatgccaaagtgattccacgcccgcgtcgtcgccatacgcccacgcggtgtacgctgcaaaaagccttgctgaatcaaataaggttccagcacatcctcaatggtttcacgttcttcgccaatggctgccgcaaggttatccagacctaccggcccaccaaagaacttatcgattaccgccagcaataacttgcggtccatataatcgaaaccttcagcatcgacattcaacatatccaacgcctgagcagcgatatctgccgagatggtgccatcgtgcttcacttcggcgaaatcacgcactcgacgcagcagacggttggcaatgcgcggcgtaccgcgagcgcgacgagcaacttccagcgccccgtcatcactcatctcaagccccataaagcgtgcgctgcgactgacgatatattgcagatccggcacctgataaaactccagacgttgcacaatcccaaaacggtcgcgcaacggtgatgtcagcgaacctgcgcgcgtggttgcaccaatcagggtaaacggcggcaaatcaattttaatggagcgtgccgccggaccttcaccaatcatgatatccagttggtagtcttccattgccgggtacagcacttcttcaacaactggcgatagacggtggatctcatcaataaacagcacgtcatgcggttcaaggttagtgagcatcgctgccagatcgcccgccttttccagcaccggaccagaagtcgtgcgtaaattaacgcccatttcattggcgacaatgttggcaagcgtagttttacccaaccccggaggaccaaaaatcaacaaatgatcgagggcatcgccgcgcagtttcgctgctttgatgaaaatctccatctgtgaacgaacctgcggctgaccaacatactcttccagtaatttagggcgaatggcgcgatctgctacatcttccggcaaagtggtaccggcagaaatcagacggtctgcttcaatcatcctttacctcataacgcggcgcgtagggcttcgcgaattaatgtttcactgctggcgtcagggcgagcgattttgctcaccatgcggctggcttcttgtggtttatagcccagcgccaccagcgcagcaaccgcttcctgttcagcatcgttggttgccgggctggcaggcgacgtgagcaccagatcggcggctggcgtaaagagatcgccatgcagacctttaaatcggtctttcatttcaacaatcaagcgttcggcggtttttttgccaatacccggcagtttcaccagcgcccccacttcttcacgctcaacggcattaacgaactgctgcgctgacattccggagaggatcgccagcgccaacttcgggccgacgccgttggttttgatcaactctttgaacaacgtgcgctcttgtttattgttaaaaccgtacagcagctgcgcgtcttcacgcaccacaaagtgggtgaaaacgatcgcttcctgtcccgcttcagggagttcataaaaacaggtcatcggcataagcacttcatagcctacgccgcccacttcaattaacaccagcgggggttgtttttcaatgatgatgcctctgagtctgcctatcacatgacgctcctgcgtaatgaatcaaagataatgctgtatgataaaaaaatgctggatagatatccagcgaaggatgaagaaaacttgcgaggtgtctcgatgatctgaaaaatggcacagtataatttattctacaggttattttggaagcaaatattttaatattacat

SEQ ID NO: 240 - DNA, 20011 bp, Escherichia coli
  source 1..20011: mol_type = genomic DNA
ttagaaaacacgaggcaagcgagagaatacgcggcttgcacgcgaattggcgttaaagacggctcaaagaaatatcttttattttttaactggttagataaatgcaatggcagtcactgaacaggcatctcttgccataaaactgtcatcactcatcttgacaaatgttaaaaaagccgttgctttggggataacccggtaaggccggagttttatctcgccacagagtaaattttgctcatgattgacagcggagtttacgctgtaacagaaatattatggtgatgaactgtttttttatccagtataatttgttggcataattaagtacgacgagtaaaattacatacctgcccgcccaactccttcaggtagcgactcatgagtaaaccgttcaaactgaattccgcttttaaaccttctggcgatcagccagaggcgattcgacgtctcgaagaggggctggaagatggcctggcgcaccagacgttacttggcgtgactggctccgggaaaaccttcaccattgccaatgtcattgctgaccttcagcgcccaaccatggtacttgcgcccaacaaaacgctggcggcccagctgtatggcgaaatgaaagagttcttcccggaaaacgcggtggaatatttcgtttcctactacgactactatcagccggaagcctatgtaccgagttccgacactttcattgagaaagatgcctcggttaacgaacatattgagcagatgcgtttgtccgccaccaaagcgatgctggagcggcgtgatgtggttgtggtggcgtctgtttccgcgatttatggtctgggcgatcctgatttatatctcaagatgatgctccatctcacggtcggtatgattatcgatcagcgcgcgattctgcgccgactggcggagctgcaatacgctcgtaatgatcaagcattccagcgtggtactttccgcgttcgtggcgaggtgatagatatcttcccggcagaatcggatgacattgcacttcgcgtggaactgtttgacgaggaagtggaacgattgtcgttatttgacccgctgaccgggcagattgtttccactattccacgttttaccatctatccgaaaacgcactacgtcacaccgcgcgagcgcatcgtacaggcgatggaggagatcaaagaagagctggccgccagacgcaaagtgctgttggaaaacaacaaactgctggaagagcagcggctgacccagcgtacccagtttgatctggagatgatgaacgagctgggctactgttcggggattgaaaactactcgcgcttcctctccggtcgtggaccgggtgagccaccgccgacgctgtttgattacctccctgctgatgggctgctggtggtcgatgaatctcacgtcaccattccacaaattggcggcatgtatcgcggtgaccgggcgcgtaaagagacactggtggagtacggcttccgcctgccatcagcgctggataaccgtccgcttaagtttgaagagttcgaagcattagcgccgcaaaccatctatgtttcggcgacgccgggtaattacgagctggaaaaatccggcggcgatgtggtggatcaggtggtgcgtccaaccggattgcttgacccgattatcgaagtgcggccggtggcgacacaggttgatgatcttctttcggagattcgtcagcgagcggcaattaacgaacgcgtactggtcaccacactgaccaagcgaatggcggaagatcttaccgaatatctcgaagaacacggtgagcgcgtgcgttatcttcactcagatatcgacaccgtcgagcgtatggagattatccgcgacttgcgtctgggtgagttcgacgtattggtagggatcaacttactgcgtgaaggtctggatatgccggaagtttcgctggtggcgatcctcgacgctgacaaagaaggcttcctgcgttccgaacgttcgttgatccagaccattggtcgtgcggcacgtaacgttaacggtaaagcgattctctacggcgataagatcaccccatcaatggcgaaagcgattggcgaaaccgaacgtcgccgcgagaaacagcagaagtacaacgaggaacacggcattacgccgcaaggcttgaacaagaaagtggtcgatatcctggcgttggggcagaacattgctaaaaccaaagcgaagggcagaggaaaatcgcgaccgattgttgagccggataatgtgccgatggatatgtcgcctaaagcgttgcagcagaaaatccatgagctggaagggttgatgatgcaacacgcgcagaatctggagttcgaagaagcggcgcaaattcgtgaccagttgcatcagctgcgtgagctgtttatcgcggcatcgtaacaggatagcgaagaagactgatgacaaacggaaaacagcctgatgcgctacgcttatcaggcctacattttctccgcaatatattgaatttgcgcggtttgtaggccggataaggcgttcacgccgcatccggcataaacaacgcgcactttgtcttcaataggaagccggaattttccttcggatttccgttaacctaaagcctgtaacgccttttccagcgcgttatgtaacaactggcggtcatgacgatacggaatatcgctggcctccagtacctcctggatcacaatccgctctttcaccgccgagacatccacttttggcccgacgatgaccgcatcaatgacctttttaccaacatactgctccataattgccagcttgctttccagcttcaaattagccgcaggtaaactcaactcacgccccagattgccgatataaaccatcggcgctggcgtgcggcgtaatgcctgggcgatttccttcagcagcagaattggcatcaggctggtataaaaactgccaggcccaataatgatgagatccgcttcattgatagcgtgaaccgcctcacgcgttgcgggtacattaggcgttaacaataactcttgaatcggcgtagttaactggtcgatattgacctcgccgtaaacttcatgcccctgatcgtcaatcgccatcagatcaacaggatgctctgacattggaatcaaatgcgtatccactttcagcagattacgaattaaattgatggcttccagaggccgcacgctaaggtgatccagcgcctttaacatcaagtttccgagattatgaccggaaagttcgccattgccaccaaaacggtattcaaacatcgcggaggcgacgctcggttccgttatcagctggttgaggcagttgcgcatatcgccccaggcannnnnnnnnnaacggcgaatacgccccgtcgagccaccattatcggtggtggtgacgatacccgttaaacgagaacccaaagacgaaagtgatgagagaacgcgtcccagtccatgccctccgccgagagcaacgacacgatcaagatcagccagcgtacgattgcgcatatagtttcctggagtcagattatccgcgctacagtagcgcaaattgcggggaaacagcaattaacctgccaatattgaggatacaaactattttcttctacctctaaaggacgatgcacgctatgcctccctgatgatgtatatcaaagtaaagccgccattttcccttattctgtagcgaaatagcacgatcatgacgctatatacatgattacatagcgaaagtgtggatggtaaaaatctcatttacacgctagtatcggcataaccactaaacactctagcctctgcacctgggtcaactgatacggtgctttggccgtgacaatgctcgtaaagattgccaccagggcgaaggaagaaatgacttcgcctcccgtatctggaaaggtgtacatggcttcacaactgactgatgcatttgcgcgtaagttttactacttgcgcctgtcgattaccgatgtgtgtaactttcgttgcacctactgcctgccggatggctacaaaccgagcggcgtcaccaataaaggctttcttaccgtcgatgaaattcgccgggttacgcgcgccttcgccagtctgggcaccgaaaaagtgcgcctgacaggcggtgagccgtctttacgccgcgactttaccgatatcatcgccgctgtgcgggaaaacgacgctatccgccagattgcggtcaccaccaatggttaccgtctggaacgcgatgtggcgaactggcgcgatgcgggacttactggcattaacgtcagtgtcgacagtctggacgcccgccagtttcacgctattaccgggcaggataaattcaaccaggtcatggcggggattgatgctgcatttgaggccggttttgagaaggtcaaagtcaataccgtgctgatgcgtgatgttaatcatcaccagctcgacacctttctgaactggatccagcatcgccctatccagctgcgtttcatcgaactgatggaaacgggcgagggcagcgagctcttccgtaagcatcacatctctggtcaggttctgcgtgacgagctactgcgtcgcggctggatccaccaattacgtcaacgcagcgacggtcccgcgcaagtcttttgccatccagattacgccggagagattggccttatcatgccgtatgaaaaagacttctgcgccacttgcaaccgcctgcgcgtttcctccattggtaaactccatctctgcctgtttggtgaaggcggcgttaacctgcgcgatctgctggaagacgatacccagcaacaggcgctggaagcgcgtatttcagcggcgctgcgggagaagaaacagacccatttcctgcatcaaaacaacaccggtattacgcaaaacttatcgtacattggcggctaaaacgtcaaaaggagagatcagatgagtcaggtaagcactgaatttatcccgacccgtattgctattcttacggtttctaatcgtcgcggtgaagaagacgatacctccggtcactatctgcgcgattcggcgcaagaagcgggccatcacgttgtcgataaagccattgtgaaagaaaaccgctacgctattcgcgctcaggtatctgcgtggatcgccagcgacgatgtacaagtggtattgattacgggtggtactggcctgacggaaggtgatcaggctcccgaagcattgctgccgttgttcgaccgtgaaattgaaggttttggtgaagtgttccgtatgttgtcgtttgaagagattggcagttccacgttgcaatctcgtgcggtagcgggcgtcgccaacaaaacgctgattttcgccatgccgggttcgaccaaagcgtgccgtaccgcatgggaaaatatcatcgcgccgcagctggatgcccgtacgcgtccgtgtaatttccatccacatttgaagaaataagtatgtcgcaactgacccatatcaacgccgctggcgaagcgcacatggtggatgtctccgccaaagcggaaaccgtgcgtgaagcgcgggcggaagcctttgtcaccatgcgcagcgagacgctggcgatgattattgatggtcgccaccacaaaggcgacgtatttgccactgcgcgtattgccggtattcaggcggcaaaacgcacctgggatctgatcccgctctgtcatccgctgatgctcagcaaagttgaagtcaatttacaggccgagccggagcacaatcgggtgcgtatagaaaccttatgccgcctgaccgggaaaaccggtgtcgaaatggaagcattaaccgcggcctccgtggcggcgctgaccatttatgacatgtgcaaagcggtgcaaaaagatatggtgattggtccggtacgtttgctggcgaagagcggcggcaagtcgggtgactttaaggtggaagcggatgattaaagttctttttttcgcccaggtgcgcgagttggtgggaacagatgcaaccgaagtggctgcggatttcccaactgttgaagcgttacgccagcacatggctgcgcagagcgatcgctgggcgctggcgctggaagatggcaaattactggctgccgtcaaccagacgctggtgagttttgaccatccgctgactgacggcgacgaagtagctttcttcccgccggtaaccggaggttaagatggcagaaaccaaaattgttgttggtccgcagccgttcagcgtaggagaagagtacccgtggctggcggagcgtgacgaagacggtgcggtagtcacctttactggtaaggtgcgcaaccataacctgggcgacagcgtcaaagcattaaccctcgaacactatccggggatgactgaaaaagcactggcagaaattgttgatgaagcgcgtaaccgctggccgctggggcgcgtcactgtgattcaccgcatcggggaattatggccgggcgatgaaatcgtttttgtcggtgtcaccagtgcgcatcgcagcagtgcgtttgaagccgggcagtttattatggattatctcaaaacccgcgcaccgttctggaagcgcgaagccacgccggaaggcgaccgctgggttgaagctcgggagagcgatcagcaggcggcaaaacgctggtagttttttgttagccggataaggcaccgctgcgtccggcaatttcaccgctcagtacatgcgtttacgctgcgtcgatgcacagcctcatcattttgcagtatccttaagatattccttatatcttcaggagatcgtcatggacagattcccacgttctgattcaatcgtacaaccccgggctggcttgcaaacttatatggcgcaagtctatggctggatgaccgttggcttgttgctgaccgcatttgttgcctggtatgcggctaattccgcggccgtgatggagctgttgtttactaaccgtgtctttttaatcggtctgatcatcgcgcaattagcattggttattgtgttatcagcgatgattcaaaagctgagcgcaggtgtaacgacgatgctctttatgctttattcggcgctgacgggtcttacgctttccagtatattcattgtctataccgctgcttctatcgccagtactttcgtcgttactgccgggatgttcggcgcaatgagcctgtacggttacaccacgaagcgcgatttaagtggctttggcaatatgctgtttatggcgttaatcggcattgtgctggcatcgctggtcaacttctggctgaaaagcgaagcattgatgtgggcagttacctacatcggcgtgattgtctttgtcggattgacggcgtatgacactcagaaattgaaaaatatgggtgagcagattgatacccgcgacacgtcgaacctgcgcaaatattccattcttggcgcgttaaccttgtatctggacttcatcaacctgttcctgatgttgctgcgaatttttggcaaccgccgttaattctttttcaccatcaatatcccggccatgtgtcgggattttttttcttactaaaaacgacacttaacaagtaccaggtataaaatacgccttatggcgagcggaagcgttttccgtatccataaatacaaaagtattttgtatgcgtggttttaaatttattgatggtgaatattaatattttttctaaggacaactaaaagaatggaatcatactcacaaaacagcaataaattagattttcagcacgagaccaggatattaaacggtatatggctcattaccgctttaggtttggtggcaaccgcaggactggcctggggagctaagtatctcgaaattacggcaaccaaatatgattcaccaacaatgtatgtcgccatagggttattattagtttgtatgtatggcttaagtaaggatatcaacaagataaatgccgtcatcgcaggcgtaatatatctgtttttactctctttggtggcgattgtcgttgcaagtttagctcctgtacctgccattatcgtcgtgttcagcactgcgggcgcgatgtttttgatcagtatactggccggtttattatttaatgttgatcctggttctcaccgttttatcattatgatgacgttgacagggttggccctggtgatcatcatgaatgccgcattaatgagtgaacgacccgtttgggtaataagttgcttaatgattgtgttatggtcaggcattatctcgcatggacgaaataagctccttgaattggcggggaaatgccatagtgaagagttgtggagtccggttcgttgcgctgttacaggtgcattaacactctattactattttatcggcttctttgggatacttgccgcgatagctataacgcttgtctggcaaaggcatacgcgtttttttcattagtcgtaaatgcagatactaaagaacttaactaaacttcacatcgccgcttcatttttcgcccgtagcttcttcgcctggctttccagtagcaggtaacagatcagcgccagcagcagcgggataaagtaatacaggacgcgataagcgagcagggcggcgataatgctccctttcgaggtatgctccccagccagtagtgcgataaacaccgcttccagcacaccgatccccgccggaatatgcacgatgacgccagcaatactactaaccagtaacacgcccagtacaaagaaatagttcacgctttgaccaagtaacagccagataatcgcccccattaccatccagttaacgctggaaatcagcatctgagcgagggcgaatttccatgaaggcagcaccagcttttgccctttgatggtcatatggcggtgcttcgcgaaagcgcaaaaccacaaataaaccgcgataatcatcagtaagccaatgccgagaatacgcagcgtagtttgatcgacataccagtgatccggcaactccaccacgcctgcggtaaagataatccctgccagtaaaatatagcccagccagttggtggtaatactgagcgagaaaatccgcgtaatagtgctaccgggcaaccccagacgagagtacaaacgatagcgcataccaatgccgccgacccaggtactgagcgtcaggttgaaggcgtagcagataaacgacaccagcatcacctggcgcttcgccagtttgtgaccgcagtaaaagcgggcgagcaggtcatagcagccgtaaatcagatagctgacgaccaccagcccgaccgcactaagcagcgcaacgcgattgtagtcgcggatgaccttccagacctcttcccagtccacttttttggcgtagaccaccagcaacacaatcaccgcgataaaaaacagccaggtgaggatcttctttgctaagcgccagcgcgggtgtgatttactcatcagggttttacccccgtgttttcagtttctacccgatcctgcgtttccattgtcggttgtgcgggcggatcaacctgcgccagacgtggcgtgtgtgccggaagccagccaaccagcgccgggaagtggcgtaaaaagtggaacgccagcacgcttttggtcaggttccaccaggtgcgtttgggcagcatggtttcatccacctgctgacaatctgcggcgataatgccgttcagattatcgcgcagcgtctggttaaaattacgatcgtggatgatgacatttgcttcgagattcagtgacaaactgagcggatcgagattactggaccctactgttgcccagtgatcgtccatcaatgctactttgccgtggagcgggcggcggcggtactcaaacacctgaacgccgcctttaaccagatagttatacagcaagcgcgcgccgactctgacaatcggcatatccggttcgccctgaatgatcagtttgatccgcaccccgcggcgtgccgctttacgcaaggcgtgtaaaaatcgatagccggggaagaagtaggcgttggcgataatgacttcccgccgcgcctgagtgagcattttcagatagtggcgttctatatcatcgcggtgttcttcgttatcgcgccagaccagcaatacctgcgcttctcccggctggcgattttcttccgctttgtgatgacgtcgccaccagcgtcgtgccgcgctctgtccaggcaggttttccagctcaaactggagaatatcttcgacaatcggcccttcaaggcgtaccgcgtaatcctgtttagcctctggaccgtagctggacatatgctcggcggagtaattcagcccgccaataaaggcgatacgcgcgtcgatcaccacaattttgcgatgcatccggcgaaacacattggtgcgcataccaaaaaggcgagggcggggatcgtagtagcgaaataccacgccagctgccgtcagttcattgacaaactcatcgctgagatccggcgaaccgtagccatccagcaagacttccgctttaaccccgcgttgcgctgctgccagtagtgccgcatgcagctgtttgccgacgtcatcctcaaaccagataaacgtttcaagaatgatgcgttcttgtgcctcgccaatcgccttaaacaccgcgggataatattgctcgccgttttccagcaactggatcttattgccttcgcgccagctacatttcataaatgaatctccgcacttaaaggggcatgatcagaaaggtgtcgccatgtccgcagcggcaacgcggttggcgcgctggcgctggcatttttgacgtagatcctgtccagtcgtagtagaggaaattgcaccggaaacgtgcgcgccgggcgtccgtgggcgcgggtaaaaatctcatccagtccggcctgcacttttaacggatgattagctttttgccgccagtcattgaaatcacccgccaccaataccggttcgccgtccggtagctcattcacccattcggcgagcatcgcaagctgcgcctgacggtgcgcctcacgcaggcccagatgtacgcacatcacatgaatcgcttttccggtcatcggtggcacaatgcggcagtagagcacgccgcgcttttccgcaccatcgaccgaaacatcgcgattctcataatgttcaatgggataacgcgacagtacggcgttgccgtgatgcccttccgggtatacggcattgcgaccgtaggcaaaatcgctccacatcgtgtcggcgagaaactcgtagtgcgaggtatcgggccagttttccacatgcagcggatgaacttcgtgcgcgcccatcacttcctgcaggcaaacaatatcggcgctgacggtacgcaccgcgtcgcgaagttccggcaaaatgaagcgtcggttaaacgcggtaaaacctttgtgaatgttgatggtgagcaccttgaacgaaaattgttgtgtttgatcgggcataattttcctgtctttgcctcttatctcattgaaatagtgtagtcggcgtcacaaaaaggtgcggtcttacggaattttccgtaaagttcggtactctgagtaagtagagataaattcttcaggagagaagccatgaagtggcaacaacgtgttcgtgtcgcaactggtctaagttgctggcagattatgttgcatttactggtagtggcgctgctggtggtgggctggatgagtaagactctggttcacgtcggcgtgggattatgcgcactgtattgtgtcacggtagtgatgatgttggtgtttcagcgcccccccgagcaacgctggcgtgaggtggcagacgtgctggaagagctgaccacgacctggtattttggcgcagcgctgattgtgctgtggctattgtccagtgtactggaaaacgactgtttgctggcaattgcagagctggcaatccttgcaggcccggcggtagtgtctttgctggcgaaagataagaagttacatcaccttacgtctaaacatcgcgtacgccgctgaccctgtcgtggccgttatcaccagtagcggccacaaactattccacacaatatccagactcgcatccttcaaataaatctgcttggtaatgtccgtaaagtggcgaatagggttaatccacgtcaggttttgcagccatactggcatgttttccaccggagaaacgtaaccggaaaggagaatggcgggcatcataaaaacaaacacgccgataaacgcctgctgttgtgttgaacagagtgatgaaatcaacagaccgaatcccaccagcgataaaccataaatcaccatcgtaaagtagaacagcgccagcgatccggcgaaggggatttgatacgcccagataccaatcgccagcacaatggtggcctggaaggtggcgacaattaacgccggtacggctttgccgatgaagatctgccaggtggtgagcggcgaaaccagtagctgatcgagcgtaccttgttcacgttcgcgggcgacggaaagtgaagtgacgatcattacgccaatagtggtgatcatggcgatcagcgacggcaccacaaaccatttgtagtcgagattcgggttataccagttgcgtaccaccagctcgctgttattaggtttcggttttccttccagcagctcctgctgataatttttgacgatctgttgcaggtagttggcggcaatttgcgcactgttggagttacgcccgtcgaggatcaactgcaacggcgcggtctggaaggtatccagtttgcgcgagaagtcagccgggaaacgcaccaggagtaacgccttttgtgtgtcgatggttgggcggatctcctgtgggcttttcagcagcagcacatgagtaaaggcgctggcgcgggcaaaacgttgggtcagctccaccgaatgctcgccgttatcttcatcgtagatggcgatggtggcgttagtcacttccagcgtggcggcgaacgggaacaggatcacctgaataagcacaggtaaaatcagaatcgcgcgggtttgcggttcgcgcagcaacgactgcaactctttgcggattaacgtccataagcgatgaaacatgctcttctccctaatccagccgacgtttggttttcagccacgtcaggccgataaacatcaccgccgaagcgatcaaaaacagcacgtttaccaccagcaccaccggaatattcccggcgaggaacaggctttgcagggtgctgacgaaataacgagcgggaataatgtacgtcaccgcgcggatcaccgcgggcatactgtcgatctgaaaaataaagccggaaagcataatcgacggcagaaaagccgcgttcagagcgacctgagcggcattgaactggttgcgggtaatcgtggaaatcagcagccccatccccagggtactgagtaaaaacaggctggagataaaaaacagaatcagcagcgaaccgcgatacggcacgccgagaataaacactgacaccagcatacacagcaacatcgccagcatcccgagaaagtaataagggatcagcttacacagcagcagttccgtgcgggtaatctccgtagagagcagagcctccatggtgccgcgttcccattctcgcgccaccaccagcgaggtgagaatcgcgccgatgaccgtcatgatgatggtcaccgcaccggggataatgaagtgctggctaatcgccgccgggttaaaccagtagcgggtttgtacatcaataagcggttcaaaagtctgcccgttgtcctccgctcgctgcatttgccagatctgccagatcccttcgacatacccctgcacaaagttagcggtattcggctcactgccgtcggtgatcacctgaatcggtgcggtggcgttggcgcgctccatctgttccgcaaaatccaccggaataaccaccagaccgcgaattttccccgcctgcattttggcgatcagttcctgacggttatcgctgatggtggcgtcgatgtagggcgaaccggtcatagtgtgggtgaaatccagcaccgcttcgctacgctgttccagtaaaatcccgacccgcagcttgctggagtcgaggttaatgccgtaaccaaaaataaacagcagtagcagtgggatcactaccgcaatcagccagctactcggatcgcgaacgatctgccgcgtctctttaacgcacagcgcccgcacgcgacgccaggaaaggatcgggttactcattgctatgctccttatcccagtcgtggatcaactgaataaaggcttgctccatggtgggatcgggttgctcatcgttagccgactgtgctttcaaatcgtccggcgtaccgctggcgattaatttcccacggtacaccaggccgatgcggtcgcaatattccgcttcatccataaagtgggtggtgaccatcaccgtgacgcctttctctaccatgctgttgatgtgcagccaaaattcacggcgggtgaggggatcaacgccggacgtcggttcgtcgagaaacagaatgtccggttcatgcatcagcgaacaggccagcgccagccgctgtttaaaacctaatggcagttcatcggtggcgtgggaggcgatacttttcaggccgaatgcctcgctcatgcgggagattttttcgttctgcgcccgaccgcgtaagccatacacaccagagaaaaagcgtaaattctgttcgaccgtcaggttgccgtagagcgaaaatttttgcgccatatagccgagatgctggcgtgctttaccggaactctctttcagatccatccccagcaccagcgcctgaccagaggtcggcaccagcaaaccgcacatcatcttaaaggtggtcgatttacccgcgccgtttggccccagcaaaccaaaaatctccccacgtttaacggcaaagttgacgtgatcggtggcggcaaaatcaccaaatttcttggtcagttctttcgcttcgatcaccgtctcgccgggtgtgccgtctaccgtatgcaatattgcacccagcggcgattctgaggttccggcaccgcccagcaaatcaataaacgcatcttcaaagcgcggtgtagtttcgttgatattgatttccggcatcccgtcggcatggcgaatatcgtctggtgtggcctcttttttgaggatcagacgtaccgatttcccctgaatcatgccgtcgctgacctgtggcagtttcaaggcgcgttgcaatagtttgcggttgccctcgtgtggactggtcatcagaaagctgcgtccggccatggtttgtgtcagggcttttggttccccctgatacagcaactcgccttcgttcatcagcagcacgtcacggcactgctcggcttcgtcgagatacgaggtactccagaggattaacatcccttcgcctgccagctcatgcaccatctgccacagttcgcgccgtgagatagggtcaacgccgacgccgggttcatcgagcagcaacactttcggttcgcccaccagggtacaggccagaccgagtttttgtttcatcccaccggagagcttgcccgccaggcgtccggtaaacggcccaagagacgtaaactccagcaggcgagcaaaagtttgcttacgtgcctcgccggtgacgctgcgcaaatccgcgtacagattgaggttctccatcaccgtgagatcttcatacagaccaaatttctgcggcatatagccgagcacggcgtgcagcgcgccgtcgtttttgattggatcaaagccaatcaccgtggcattgccgctgtcgggtttcagtaatcccgccagcatccgcattagcgtggttttacctgcaccatccggccccaccagccccgtcacataaccggcgtgaatggtacaatcgagcggcgcgacggcgggcttgtccatgcccggaaagcgtttttccaggccgttcagcgtgataacggcatcattcatgtcctgcctcgttaccgaattgcaccgtcaccggcattccctggcgtaacgcatcatcggcgtcggtcaccacaatacgcaggcgatagacgaggtcggtacgcagatccggtgtttcgacggttttcggggtaaattcagcagtcggcgaaacgaaaccaatctgcccgtgatacggcttgtccgggcgaccatcggtataaagcagcactttgcgccccggctgggcctggtcaagattccgttcatcaacataagcgcgcacccacaccggacgcgttagtgaaacggtaaacaccgtgccaccttcattgaggaccgtgcctggctccaccgcgcgcgttaacagcgtgccatcagacggggctatcaacgttgagtcctgcaaattcaactccgcctgcgccagttgcgcctgcgcctgttcgaggctggctttcgcctgggcgatgtcctgttcacggttaccggaacggtactgacgcaatttatcctgtgctgatttcagcgttgcctgcgcctggtcgcgcgaggagcgggcattttccaggtcatttgccgaaatggtgcggcttttccacaacccttgctggcggttgtagaagttctgcgcatagtcataggcggcctgcgcctgttttacggctgcggcggcctgagcgatttcttcatcgcgatacccggcaagtatcaggtcatactgcgcctgcgccaccgaaacacccgctttcgcctgcatcagggcaatctcatacggcttgtgatccagttcgcccagcacctggcccgctttgatagcatcaccttcgtccaccgccagcgattcaacgcgccccccaacacggaaactaagattcaccgtacgaatatccacgttgccatacagcgtcaggccgttatcctggcggctttgataccaccagtagcctccggcaaccacggcggcaagtaccactaccgccagtccgatcacgacaggttttttcatcactacaaactcctttgcgataatccttgcaaaatcaggtcgatatgacaggtcaccgtctggttgatcagttcggtcttttcttcatcgaacgcggtccagccggtacgtaacagaattgtttctttgccaagacggaacgccagaatctcaccaatcaacgcatgggtatgaaggatcatgcgggtgtcattggcgtcgctgccggtccaggcggcaatcaggcgtgtcaggtggctgtgtagcggactaatcacctgttcgtgcaccaggtggtaggctgccgtgggagagagctgctcacgggagataaacttgctgaggttgacggtgtcatcctgggtgagcagcttaatcatgttcctgcaggcgcgaaggatcagttcacggatggcagcccgatcaggctgtggttgggcgaacaagcgttcggcttcctcggcatgcggacggaactgctcgccaataaaatcggcaatccactgggcgcaggcgaggtacaaatcttctttcgaaccgaagtagtaggtgatggcagcgatattctgcccggcctgggcggctatctcgcgggtggtggcgttcattccatattcaccaaactgcgccagtgcggcagcaatcagctgttttttcgcctgttcacccttgattgtcatggcaggattattcatcgcacagtccattcttaatcaaatgattgattaagattatgactccatatgggagttgtccagtatggctaagaattttagctacgccagtcacagggataatttatgcgctgcgtcacaaaaactgctacactccgctccctcatgacattgtggtttttgtcattttccttttcagtatctccctgaaaactacaccggtaacggtcggggcggttcggagtagttatgtctttcgattctttgggtttaagccctgatatcctgcgcgccgttgccgagcagggttaccgtgaacccacccctattcagcagcaggcgatccctgcggtgctggaaggccgcgacctgatggctagcgcccagaccggtaccggtaaaacagcgggctttacgctgccgctgttgcaacacctgatcactcgccagccgcacgccaaagggcgtcgtccggtacgtgcgctcattcttaccccgacccgtgaactggctgcgcagattggcgaaaacgtccgtgattacagcaaatatttgaacattcgttcgctggtggtgtttggcggtgtcagcattaacccgcaaatgatgaagctgcgcggcggcgttgatgttctggtggcaacaccgggacgtttgctggacctggaacatcaaaatgcagtgaagctggatcaggttgaaatcctcgtcctcgatgaagctgaccgcatgctcgacatgggctttatccacgatatccgtcgcgtgttaacaaaactgccagcgaaacgccagaacctgctgttctctgcgaccttctctgacgatattaaagccctggcggaaaaactgttgcacaacccgctggaaatcgaagtggcacgccgcaataccgcgtctgatcaggtgacccagcacgttcactttgtcgataagaaacgcaaacgcgaattgctgtcgcacatgattggtaaagggaactggcagcaggtgctggtgtttacccgtaccaaacacggcgctaaccatctggctgagcagctcaataaagatggcatccgtagtgcggcgatccacgggaataaatcgcaaggtgcgcgtacccgtgcgctggctgattttaaatcgggtgacattcgcgtactggtggcgaccgatatcgctgcgcgcggtctggatatcgaagagttgccgcacgtcgtcaactatgaactgccaaacgtaccggaagattatgtccaccgtatcgggcgtaccggtcgtgcggctgctaccggtgaagcgttgtcgctggtgtgtgttgatgaacacaaactgctgcgtgatatcgaaaaactgctgaaaaaagagatcccgcgcattgcgattccgggctatgagccggacctgtcaatcaaagccgaaccgatccagaacggtcgccagcaacgtggcggcggcggtcgtgggcaaggtggtggtcgcggtcaacagcaaccacgccgtggggaaggtggcgcaaaatctgcaagcgcgaaacctgcagaaaaaccgtctcgccgcctcggcgatgccaaaccggcaggcgaacaacaacgtcgccgccgtccgcgtaaacctgccgctgcgcagtaatcttttatgccgggctatgcccggcatcaggctgatgaacaaacgcaaaactgtctgatgcgctacgcttatcaggcctacgtgaactctgcaatatattgaatttgcatgcttttgtaggccggataaggcgtttacgccgcatccggcatttcacaacaagcacttgtcagcaatttgagaacacgggaaaaaatttatctgttttaccgcccataagccaccgagacgttacttctctatagccaattgttcgcgcaactccattaaaaggtagcccagtcgattcttgcccttaccattaccaccgtctccccagtaagcatcgttttccgtatgctcaaccagttttgcgggcgcggttgccagcaagagcgcacgcagttctgcatgctgttcgaatttagcgcgaagtgcttttcgcatcacctgttctttgaccgactcccagtttttacgcagaggcttagaacgatcgcgccccatgcgtgcggcgaccataggggaagaaacccgacggatctcttcgcggtatttttcatcaaggaatttttgtgcctgaaaatagtgttctgaggtgggccaggttttcccgtcaaccttgatgggccaggcggcaaagttagaaaaatcaccgtagtcatcgctggtgctgtagaaatttatgatggtgtcttgcatgacgtgttggatcctttgtgctcgaacgggcattaaaccgcattatgttggtggttattgcgagccgctttccagaaacagaaaaaccattacccctgaaaaccgaaaaatgccacaatattggctgtttatacagtatttcaggttttctcatggcattaaccgccgcgcttaaagcgcaaattgccgcctggtataaggcgcttcaggaacagatccccgactttattccccgtgcgcc

SEQ ID NO: 241 - DNA, 19986 bp, Escherichia coli
  source 1..19986: mol_type = genomic DNA
acaataacaagggaagacttactcgtggctgcaaccctactagctcaaaatttattcacacatggttacgctttggggaaattatgaggggatctctcagtgctgcgtatctgttttatgcgcaaaaaacgtcagcaggccagttgtttgatgtaaatggcgctattaattgcacaacgctgaatcagtcatcagaccgcgaccttaaagacgatattctcgttatcagcgacgcgacgaaagcaatccgtaaaatgaacggatacacctacacgctcagggaaaacgggatgccttatgctggcgttattgcacaggaagtaatggaggcgataccagaagctgtgggatcgtttactcattacggtgaagagttgcagggaccaacggttgacggcaatgaattacgtgaagaaacacgttatctgaatgttgactacgccgccgtgacggggttacttgttcaggtcgcccgtgaaacagatggtcgcgttaccgcgctggaagaggaaaacataacgctacgtaaaaatctggcaacagcaggcacccggatcagcactctggaaaatcaggtaagcgaactggttgcacttgtcgggcagttaacaggaagcgaacattgatatccttcaagccctgaaggaggctgttcctggtacgttcagactgttgttgagctggaaatcgcaacggaggaagaaacttcgttgctggaagtctggaaaaagtatcgggtgttgctgaaccgtgttaatacaacaactgcacctgatattgagtggccggaagaaccagacacaatgtaagcgaaaaagaaaagccgcagacacgacgtatgcaggacgtgctgcggttggctggataactttcgatagtgcgagtattgaatgatttccaaccggaacagattctattgaaaagtatccaagggggcaatttgtaggttttagatttgtgtggtttaggattttttgtggtggcaaaaatggggcaaaacgccgtaaaaggggcaaaaatgggacaacaaaaatgttggttattgtggtttattgtagttgttgatgtgtcttaatttattgaaaaataaataaaatctttatgtgtcagatggttgtgatttttgcccttacttgttcaggttgtattgttctttcttactaatttcttgattttgcgacatttaaaagcgactcaattcgttatatggcatcagaagagtatgcgtcatgccggaacgcccagcataagaaatctgatataaaaactgtggcgtgtatggtacggattagaggggaaaatgtcagcacatttgcgaaatgaatcaaaaagcccgcagcaatgtgcgggcgttagtgtcagcgcacaaccagcacggagcactctgcgtgacgcactacagctgcggcgttggaaccgagcagataagtggtgatatccggtcgatgggaagcaatgatgatcatatgagcggggatcttcttcgccatttccagaatgcggtctttgggcgagccttcctcaacatggacatgcactctgtcggttggcagtttaaagtttttaatgatctcttccannnnnnnnnntcttccagttgcgatttggcttccgctttcaggtcatccattgccggtaattctgcggaatacgctaaacccagagaggcatagtagggcagtgaaggtattaccgtcaggaaatgaacctctgcatcatcaatctttgcctctgcctcaacgtggctaatcacgcgttgagttaattctgaatcggaaatatcgatagggacaagaatcgttctgttcataaaacctcctgttttagtatccgcataaagtgtaacgccagatgacactttttgtgtaatgacggagttcacatttttaatttagatcaaaggaggaagaataagcagaaaaagcccgccataacagcgggcaggaggatttagaactgataaaccagacctaaagcgacaatatcatcggtagagatgccattggcagcgtagaaactgtcatcttcatccaacaggttgattttatagtcaacataagtggacatgtttttattgaaatagtaagtcgcgccaacatcggcgtatttaaccagatctttatcatcaacacctgccgggttgtctgcaccaccggcagcgtgcaggtcacggcctttagacatcaggaaagagactgccggacgcagaccaaaatcaaactggtactgtgcagtgacttcaaagttctgggttttgtttgcaacagcataatcgctgtcgccaaacggggtcatattacgcgtttctgaatacatggttgccaggtaaatattgttagcatcgtattttagcccagcagtccacgcgtctgctttatcaccacccgccgcagtatggttaacctgatcattggtgcggtcagaagaggtgtatgccgcaccagcgctaaagcccatgcctaaatcatatgttgtggaaagaccccagccgtcaccgttttcatggcgaacatcacgtccgttgttggtgccttcctgaccattactggcaccttcgttgttaccttgatactgcaccgcgaagttcagaccatttaccagaccgaagaaatcagtattacgataagtcgcgacgccattggctcgaccagtcataaagttgtctgcattggtataagagtcaccgccaaattcaggcagcatatcggtccagccttcgatgtcgtacattacgccataattacgtccgtaatcgaaagaaccgtaatctgcaaatttcagcccggcaaatgccagacgggtccatgactggttttttgaagattcagtgttgtttgcctgaatattgtattcccattgaccgtagccagtgagttgatcgttaatttgggtttcgcctttaaaacccagacgcgcatagctctgatcgccatctttcgctgaattatcagaaaaataatgcaggccatcaactttgccatacagatctaatttgttgccgtctttattataaacttcggctgcatgtgcagcacctgcggcgagcagggcaggaattaaaagtgccagtactttgcttttcattgaataaatcctttagttattttatttgccttttatccccattccggggagtgaaaacatcctaaaggagaagttcagttagccgataaatatcatttgttacgccttaagtaaaaccttaatcaaataattcctctgaaatgataataagtctggtgaatgtatcgaagataatacatacaaaataaaaattatacttttaattttctatacgttattctgcgcgggttatatgcctttattgtcacagattttattttctgttgggccattgcattgccactgattttccaacatataaaaagacaagcccgaacagtcgtccgggcttttttttttagaattggataatccttatccagagcatttaatcggtgttgcttttttccgcttttccggccatttgtgccaggaagtcatagcgtttttgcaaatcagctgcagcatctttccataactgttctgccacttctggctgctgcgaattcagccgacggaaacgttgctcgtgaagtaacgtttcttccagtgctactgacggcgggcgtgaatccagcgccagcggcagtttgccttcatcggcacgacgcggatcgaagcgatatagcggccagaagccggtagctgtgagttggcgcatctggtcgtggctgagtgccagatcgtaaccatgctcttcacacgggctataagcaatgatcagcgatggccccggatacgcttccgcttcctgaatcgctttcaccgtctggttcagctgcgcgccgagagaaatctgcgccacataaacatgaccgtacatcatcatactgacgccaagatctttacgcgctttacgtttgccgtgctcgccaaatttagttactgcacccagcggtgtcgctttcgatgcctgaccaccggtgttggaatagcattgcgtatccagcaccagaatgttgacgttttccgtcaaactcaatacatgatccagaccgccaaagccgatatcgtaagcccagccatcaccaccaatcagccagattgatttttccaccagtgcatctgcatcacgtagcagttcatgtgcttcggcaacatcgttgagttgctggcgtaaagctgcgacctgttctcgacgaacctctggcgtagcgtctgatttcaacgccgtcagtaattccgccgggattttatcggcaaattgatccagcagacgcagcacgcggacacggtgttgatcgaccgtcaggcggaaaccaaggccaaattcggcattatcttcaaatagagagttcgcccatgccggcccacgaccgttggcatcggtggtatacggtgtagagggcaggttaccgccataaattgaagaacagccggtggcgttagcgatcaacatccggtcgccatagagctgagtcagtaatttaatatacggcgtctcgccacaaccggagcaagcacctgaatattcaaacagcggtgtaatcagctgcgatgtacgaatatcaatacgttccagtttgctacggtcgatttctggcaggttgaggaagaaatcgtaattgattttctcttcttcgacatgttccaggcgcgacatcatattgatggctttaatctctggattctgacggtctttcgccgggcaaacttcgacgcacaggttacaaccggtgcaatcttccggagccacctgcaagacatatttctgcccgcgcatatcacgcgatttcacatccagcgaatgcaggctggcaggggcgttttccatcgcttcaggcggcaccacttttgcgcgaatagctgagtgtgggcaagcggcaacgcagtggttacattgggtacagagttcctctttccagatggggatctcttcggcaatattacgtttttcccagcgcgtagtgcccatcggccaggagccgtctggcggcagcgccgaaacggggagggcgtcaccaagcccggcgagcatcgcagcggttacggttttcacgaaatcaggagcggcatcggaaaccactggcggtcgattggcgctgtgcggatttaccggttgcaacggaacttcttctacggattcacgcgccagcgccagagcctgccaattgcgttccaccagatcctggcctttgctactgtaacttttggcaatcgcaccctgcaattctgcgagggcgctatcgccaggcagaatttgcgtcagatggaaaaaagccatctgcatgacggtattaatacgggccgccaggccacattcgcgggcgattttcgccgcgttaatcacatagaagcgcgcttttttctggtttaacacggcctgaacttcttgcggcaagcgcgaccacacttcatctgcgctgtacggtgtgttgagcaggaaaatgccgccaggttttaaacgctcagccatctgatatttatcgataaactgcaactggtggcagccaacaaaatcagcctgggaaatgagataagcggaacgaatcggctgttcgctcacgcgaaggtgagaaaccgtcaggccgcccgcttttttggagtcgtaaacaaaatagccctgtgcgtaccacggcgtggaattaccgataatcttgatattgtttttggtcgcggaaacgctgccatcactaccaaggccataaaacaaggcttccagtttcgccgagtttggcagggtgttttccggcaacggcagtgacagattagtcacatcatcgtaaataccaaccgtaaagcgcgctttcggtttagccgcgttgagctcggcaaataccgccagtacacagtccgggccaaattctttggatgaaagaccatagcgcccaccaatgacacggggcagggtttcgcgctcaccattattaaaggcttctgccagtgcggtcatcacatccagatagagcnnnnnnnnnngagcggttctgcctgggcaccgggttctttggttctgtccagtaccgccacgctgcgtacggatcccggcagagcttgcagcaagtgtttggcggagaaggggcggtacaggcgaactttcagcacgccgactttttcgccacggattagcaattcatcaaccacttcttcacaggtgccaatggcagagcccatcaggataatcacccgttccgcttgcggatgcccgtaatattcaaacggctgatactgacgacctgtcgcggcagagaaatcattcatcgcctgttcaacatggtcatagaccgcgtcgtaccatgggttggtggcttcgcgagactggaaataagtgtcaggattggcggacgtaccgcggatcaccggatgttccgggttgagtgcccgggcgcgatgagcatcaatttcggcctgcggcatgagatcaagaatcgtgtcatcggccagcgggacaattttgttgatttcgtgggacgtgcggaaaccatcaaagaaatgaataaatggcacgcggcttttcagcgtcgcgatgtgcgaaatgagagcaaagtcttgcgcttcctggacgtttgccgcacacaacatcgcgcaacccgtctggcgcaccgccatgacgtcggaatgatcgccaaaaatagagagtgcatgtgtggcaacggtacgtgccgctacatgcaggacaaacggtgtgagttcgcctgccagtttgtacagcgtcgggatcatcagcagcaaaccctgcgatgacgtaaacgatgttgaaagggcacccgtctgcaaagcgccatgcacggtagcgatagcacccgcttccgactgcatttcaaccacgcgtggtgtgtctccccaaacgttcttcaagccgtttccggcccaggcatcagcctgttctgccatcgtggaactgggggtaatagggtagatggcgataacttcactggtgcgaaacgccaccgaagcaaccgcgccattaccgtcaatagtaatcatatgacacccttacattgcgcaaatgaggggcgcacgaaattgctgcgcgcccagtagtaatccttcaattttagcaaatggctttcttctgcattttcgcttttgtgtcccccacatcagcgtaatgaatgttttgatcaaacagagggcaaaaaaatagccataaaaaagtaaaaatgcggggcaacgcgcaggacagctctcgacgccgccctctgtgctgcctattatttatggcggtgtcgtttggcttgaagatcagaggaagaagagatgcgagcagcgttttgggtagggtgtgccgctttattgttgtcggcgtgtagtagtgaacctgttcagcaggcgactgcggcgcacgtagcgccaggtttaaaagcgtcgatgtccagtagtggagaagcaaattgtgcaatgatcggcggttcgctttctgttgcccgtcaactggatggtacggcgattgggatgtgtgcattacccaacggcaaacgctgtagcgaacagtcacttgccgccgggagctgtggcagctattaattcattaaatccgccagcttataagttaatgtctgtttcgcggtcgccagcgttaactggttcgcggtcagatccacttgtgcaccttctttcagcatttcgctaatggtgttatcgagttcattaagctgcgggttagcgcacatcatacgggtcattgccagccctttggctgtcagttcaccattagacagtttgccttcaccgctaaagcggttacacatgctgccggaaatcatcattttttcaccaaagctgatttctggcggatttttatcgctggtcacgggcttaccgtttacgctttccagcacaaagcgatgatgctgtagctgttctggcgtaacagcaattttgtcattacttacacatcccgccatcagtaggcttagcgcaacaaacgcggctactttcttcattgtggttctcaattacagtttctgactcagggctattttaagaatagaagatgaaaggtctttggggattatctgaataagctcccctggaatgcaggggagcggcaagattaaaccagttcgttcgggcaggtttcgcctttttccagattgcttaagttttgcagcgtagtctgagaaatactggtcagagcttctgctgtcaggaatgcctggtgcccggtaaacagcacgttgtggcaggcagacaggcgacggaatacgtcatcctggatcacgtcgttggatttatcttcaaagaacagatcgcgttcgttctcatacacgtccatacccaacgaaccaattttctgatttttcaacgcttcaattgccgcctgagaatcaatcaatgcaccgcgactggtattgacgatcatcacgccatttttcatctgatcgaaggcggcttcgttcaaaagatggtagttttccggtgtcagcgggcagtgcagagagataacgtctgattcagagaacagggttggcagatcaacatactccacaccgagttccagcgccgctgcacttggatacggatcgaacgccagcagacgcataccaaaacctttcagaatgcgcagcatcgccacaccgattttaccggtaccgataacgcctgccgttttgccatacatagtaaagccggtcagaccttccagagagaagttagcgtcacgggtacgctgatacgcgcggtgaatacggcggttcagcgtcatcatcataccgatggcgtgttcagcaacggcttctggatcataggctggaacacggactactttcagccccagttcttttgccgcgtcaaggtcgacgttattgaaaccggcacagcgcagggcgatatatttaacgccgtgctttttcaactcttccagcaccgggcggctgccgtcatcgtttacgaaaatacataccgcttcgcagccattggcagttttagcggttttttccgtcagcagaaagtcaaaaaattccagctcaaagccaaaggactcgttcacctgttgcaggtacttcttgtcgtactgttttgtgctataaacggcgagtttcataagactttctccagtgatgttgaatcacatttaagctactaaaaatattttacaaaatttcaaatttaattgaaagctatggcgatattgaaaaattcatcaacaactatgcttagtgtaggcgcaaccttcaactgaacggttaaacatgccacaatacccgtattgaatgcttaatttttcgctaaatcaggatattaactacccatgctgggtaaatataaagccgttctcgcgctgttattactgattattcttgtgccgttgacgctgctgatgacgctcgggctgtgggttcccacgctggcgggcatctggctaccgctcgggacacgtattgcattagatgaaagcccacgcattacgcgtaaaggtttaatcattcccgatctccgttatctggtgggagattgtcagcttgcgcatatcaccaacgccagcctttcacatcccagccgctggttattgaacgtcggcacggtagaacttgattctgcttgtctggcgaaattgccgcagacggagcaatcgccagctgctccaaaaaccctcgcgcagtggcagtccatgctgcctaacacctggatcaatatcgataaactgattttttctccctggcaggaatggcagggaaaactctctctcgcattaacctctgatatccagcaactgcgttatcagggcgaaaaagttaaatttcaaggccagctgaaagggcaacaacttacagtcagcgaactggatgtcgtcgcgtttgaaaatcagtcgccggttaaactggtgggggaatttactatgccgctcgtgccggatggacttcctgtaagtggtcatgctactgcgacgttaaacttgccgcaggagccttcactggtggatgccgagctggactggcaggaaaatagcgggcaattgatcgtgctggcacgggataacggcgatccgttgctcgatttgccgtggcaaattactcgtcaacaattgaccgtaagcgatggtcgctggagctggccgtatgcaggttttcctttgagtggccgactgggtgtcaaagtcgacaactggcaggcagggctcgagaacgctctggtcagcggacgactgagtgtgctgacccaggggcaagcgggtaaaggcaacgcggtgcttaattttggcccaggaaaattaagcatggataacagtcagctgcctctgcaactgaccggtgaagcgaaacaggcggacctcattttatatgcccgtttacctgcgcagctaagcggaagtctgactgacccaacgttggcctttgagccaggcgcgttattacgttcgaagggaagagtcatcgattcgctggacatcgatgaaatccgctggcctttagcgggtgtaaaagtcacccaacgtggtgttgacggacgtttgcaggccatcttgcaggcgcatgaaaatgaactgggcgatttcgtgctgcatatggatgggctggcgaatgattttctccctgacgcgggccgctggcagtggcgctactggggaaaaggcagttttacaccgatgaatgccacctgggatgtcgcaggaaaaggtgaatggcatgacagcacgattacgctgaccgacctctccaccggtttcgaccagttacaatacggtacgatgacggtagaaaagccgcgattaattctcgacaagcccgtcgtctgggtacgtgacgcacagcatccctccttcagcggcgcgctgtcactggacgccgggcaaacgctgttcactggcggcagtgtgttaccgccatcaaccttaaaatttagcgtcgatgggcgcgatccgacgtatttcctctttaaaggcgatttacatgctggtgagattggcccggttcgggtaaatggtcgctgggacggtattcgtctgcgcggtaacgcctggtggccaaaacaatcactgactgtattccagccgctggtgccacccgactggaagatgaacttacgcgatggtgaactgtatgctcaggttgcattttctgctgcgcctgaacaaggattccgcgcgggaggacacggcgtgttgaaaggcggtagtgcctggatgccagataatcaggttaacggtgtcgattttgtcctgcctttccgttttgccgatggagtctggcatctggggactcgcggccccgttacgttgcgaattgccgaagtgattaatctggtgacagcgaaaaatattacggctgatttgcaagggcgttatccgtggactgaagaagaacccttgctgttgactgatgttagcgtcgatgtgttaggcggtaacgtactgatgaaacaattacgtatgccgcaacatgacccggcgctgttgcggctgaataatctctcatccagcgaactggttagcgccgtcaatccgaaacaattcgccatgtccggggcatttagtggtgcattgccgttatggctaaacaacgaaaaatggatagtgaaagatggttggctggcaaatagcgggccaatgaccttgcggctggataaagacaccgcagatgcggtggtgaaagacaatatgactgcgggttcagcaattaactggttgcgctatatggaaattagccgttcatcgacaaatattaatttagataatctcggtttattaaccatgcaggccaacattacaggtaccagtcgcgttgatggtaaaagcggtacggtaaaccttaattaccatcatgaagagaatatttttacgctgtggcgcagtttacgctttggcgataatctccaggcatggttggagcagaacgcacgtctgccgggaaatgactgtccgcaaggaaaagagtgtgaggaaaaacaatgaaaattttactggctgcgttgacgtcatcttttatgctggctgcctgtacgccgcgtattgaagtcgctgcgcccaaggaaccgatcactatcaatatgaacgttaaaattgagcatgagatcatcatcaaggcagacaaagatgtcgaagagctgcttgaaactcgtagcgatcttttctgaggcgatgatgaagaaaacattacttctttgtgcgtttcttgttgggctggtaagcagcaatgtaatggcattgactctggatgaagccagaactcaggggcgggtaggtgaaacattttatggttatctggttgcgctgaaaacggatgctgaaacagagaaattagtaaccgacattaatgccgaacgtaaagcgagttaccaacaactggcaaagcaaaataatgtgtctgtagatgatatcgcgaaactcgccgggcaaaagctcgtagctcgggccaaaccgggggaatatgtacaagggataaacggtaaatgggtgcgaaaattttaatagcaaaaccgcaatatcgggataacgctacaggagaaagcgattgatctattttcctgaaacaaggtgaatattcaaaaactcctgtcaaattgcctttcgccctgaaaaatgcatagtcaaatatctgttttaactaattggcgttgcagtacacacaacgccaattagttagcggaatttacgtcgatactcgcctggcgtcatcccaaagcgttgcttaaataccgttgaaaaatgactctggtcagaaaatccccaatgaaagccgatgcctgccagtttttcatcatctgcggcatggcgaatcgcatctgcacaaaaatcgagacgacggttacgaatatattgcgcgaccaccaaacctttatcggcaaacattcggtacaaactacgtactgacatacctgtctctccggctatccactccgggcgtaatatctcttcgcgaatattatcgtctatcaacgtaaccactttttgaaactgacgttcacgacgaggttgaacagattcccgctgatgaagtaccgggcgcagcagacacaccatcgcctgtagcgcagcttcactttctgtttcagaaagtgccggattatttatgctctcctgtaacaggcgatgactgagttgcaccatgggtaagtcagcgtccagtctttctgcgcagacaggtttttgatggggaaaatattgttccagcagagtgcgtggcaaaagtaatgaaatctgtttagaagactcctgccagtaaagcgaacaggggcgtgaggcatcgagtaacgtaatatcgccagcgccaatctgcacctgacgctcatcctgctccattattgcctgaccactaagctgaaaaacggtgtaaaaccaggcatcgtcgctgccttttacctcctgccaggtgcgggataaattcaccccgctggttgtcacggtactcagctttagtcctttggcaaaatgcgtgtccagtacacccgtgtaacgctcagtcagcaggcgtccggtaaaatttccgcatacctgattgatttgggaaagccattgctgaaactcattatccattgcggggttcatggcacgctttcgctctgtgaaatgtatttttattgttgcatttgtgttgcaataaacgaagctaatgagcctgactataggaaataagtcttgtcaggcatagagacataagcggttattgtcacgatttgcggagcttgtcacagctgacaaagcgaatgtcacagcgaaaaaagtgacttttcttgtcgctgcgtacactgaaatcacactgggtaaataataaggaaaagtgatgacagagccgcatgtagcagtattaagccaggtccaacagtttctcgatcgtcaacacggtctttatattgatggtcgtcctggccccgcacaaagtgaaaaacggttggcgatctttgatccggccaccgggcaagaaattgcgtctactgctgatgccaacgaagcggatgtagataacgcagtcatgtctgcctggcgggcctttgtctcgcgtcgctgggccgggcgattacccgcagagcgtgaacgtattctgctacgttttgccgatctggtggaacagcacagtgaggagctggcgcaactggaaaccctggagcaaggcaagtcaattgccatttcccgtgcttttgaagtgggctgtacgctgaactggatgcgttataccgccgggttaacgaccaaaatcgcgggtaaaacgctggacttgtcgattcccttaccccagggggcgcgttatcaggcctggacgcgtaaagagccggttggcgtagtggcgggaattgtgccatggaactttccgttgatgattggtatgtggaaggtgatgccagcactggcagcaggctgttcaatcgtgattaagccttcggaaaccacgccactgacgatgttgcgcgtggcggaactggccagcgaggctggtatccctgagggcgtttttaatgtcgtcaccgggtcaggtgctgtatgcggcgcggccctgacgtcacatcctcatgttgcgaaaatcagttttaccggttcaaccgcgacgggaaaaggtattgccagaactgctgctgatcacttaacgcgtgtaacgctggaactgggcggtaaaaacccggcaattgtattaaaagatgctgatccgcaatgggttattgaaggcttgatgaccggaagcttcctgaatcaagggcaagtatgcgccgccagttcgcgaatttatattgaagcgccgttgtttgacacgctggttagtggatttgagcaggcggtaaaatcgttgcaagtgggaccggggatgtcacctgttgcacagattaaccctttggtttctcgtgcgcactgcgacaaagtgtgttcattcctcgacgatgcgcaggcacagcaagcagagctgattcgcgggtcgaatggaccagccggagaggggtattatgttgcgccaacgctggtggtaaatcccgatgctaaattgcgcttaactcgtgaagaggtgtttggtccggtggtaaacctggtgcgagtagcggatggagaagaggcgttacaactggcaaacgacacggaatatggcttaactgccagtgtctggacgcaaaatctctcccaggctctggaatatagcgatcgcttacaggcagggacggtgtgggtaaacagccataccttaattgacgctaacttaccgtttggtgggatgaagcagtcaggaacgggccgtgattttggccccgactggctggacggttggtgtgaaactaagtcggtgtgtgtacggtattaatctggttcgctcataagtaaaaaacggcacctggtgccgtttttttgtctgaaacaatcacttatctttcttcagcgcccctagcgttggcgtttcgtcaaagaagttccatggtttaagcagagtatgtacccattcggtcggcataatcggccactcttcggcgcgggccacatgtgtggtgccggtggtcatccagacaacggcgtcggtgttgtccagcgactcgttatctttactgtattgtccaagaccggtgtcatgagtagaacggttcggatatttgccttccgggaaacgctcgccaggatgataacgcgttacccaaagctgcttgtccataaagcttaaacgatgatagatccactcgtccggcgcgaactgggcaccttttgctaccgggtgagtaccacctgcataaggaataatttgataggaaactggattgcccatgcggttctctttgttcgggttactcaacagacgaatcgtgcccggatcaaacttctgcgcggcatcctgttcattgccgatgttgtactgattaacttgcatggtactggtgcgtgggccaccggcagtattcggttttaccactgggtccatcgccaccaggctgttattctcgccatctacatccagatcgaggcggaaattataaatatgttggtgtgtagtacccacgatattgtgatcgataagcgtgccgtagcgcgtgtcatctttcgccgtctcatcgtgcatggttttcgctttaacacctttcaccgcttcgatgcccgtagcaccggcatcaatgccaatagtgccgttttcatggaagatccagtcaaaaatgtagtcatagttacccactgtactgatccagcgcaccactaactcccggcgttcggtactgacgttgggctggcccatttcctgatgcttatactccggcccggcataacgttcaaataccgcgatagcgctatggatctccatcggcacgccagtgtagtcggcgatggtttcattaaggagcactgcgttagacggggcatctttaccacgagcaattggtgaggttagcgtgcccataccgtagtcaccagagtccagatacgctttaaagtaccagccaatatcaggatcaccgtaaggcacaatcatgccgccgagagaaccttcgtacatgactttgcgtttggtgccattgtcgttataagtcacggtggagatcatcggcccgacgcgagagttcatgctgaggtgaaaatcccagttccgccagtgaatcatatcgccagtaatggtgtaatttttaccttcagcctcaatgatttgcataggcttaactgccggagcaacgcggtcacggctatcaaatgggcgtgcggtcattggcaccggaactaccggaccttcttcaatcttaacgatttttttctgttctaaatcaacgaccgccaccaggttttcgatgggatgtgcccagtagttgccatcaccgacatcaagatagctgatgactttgagcaaccgggcatcttgtttcaggccatctttaccatcgaaataacctacggtcagcggcgtggtaatcacttttttcgcatcagtaataccgcgtttcttcacggcagcggcaaattcttcactgttgttaataatgttctgcacactggcgaaatcatccagcaacaccataccgtgggcgtctttaatgggttgccaggagagcagtttgttgttttgcagatccaccaccgcttcgatgatatgtttgccgtcgagcataatgacgtcggctttgcgcggctggtcaaccggtttgttttccagcgcaaacgcccagacagcttctttatctggcggtagcagggagatctcagtaaaacgggtattgggtttgaagtccgcggaagctttaacaatttcaacggcctgtttaatttcgtccgcagttagcgcattaagagggtgagggcgcttttctacctgaaaggtttgatccagcccggactggaaaacatcgttaataaaggtgtcagaaacccaggctttattgtctttcatcactaccggtacttgcagtgccagaggctgaccattaacaattgctgtttgcgcaccaggcttcactttcacgtacgcgccatctttaatcagggtaaagagctgggcgtagtcgtcccactgcacatcggcaccaaattctttaagcgttttatccattggcaccatatgcgcttcaccaccgtgggcaaataccggcgcttgccaggcgaaacttaaggcgactgccaacgccagggttgttttacgggcagaatacagagaggggcttcccattattaacctcgtcagatgttgtgttcttgttagcaaccgcgctctgtgggcggtttagtcaggttcacattatcagtactgatgcaaaggggattgcctgcacctgccaggttgtttggcaggtgtgccagcttttcatacagtggatgccctgaaaatagatgtacacatcatgcataatgtgacaacgtcacaaaatttagtgaaataaaagggcaactattcgccgttgcccttcattcaccgattaatcgacaaaatcaccgtgctgcctggccaccagcgtcagaattgaatacagcgccaccggggtttgatgctgattgaatacctctaccgcccattccaccacacctgttggtttttcttctgcgctacgctgttttttcagcgtcttgcgcttacaggtgagacgcacctggatggtatcgcctggttttacgggttcgataaaacgcaagttttccagcccgtagttagctatgaccggaccgacaccggcatcgacaaacagacccgcagccgcagaaagcacaaaatatccatgtaccacacgctcaccaaaaatagattcggcagcagcaattttatccatatgtgcatagaaatgatcgccgctgaggcaagcaaagttaacaatatcggcctctgtcattgtgcggcggggagtcaacaggctgtcgcctggttgcagctcctcaaaatatttgcggaacggatgaatacgatcttcttcgactttcgcaccgcgcacccactgtttactgatagcggcaagcatcgtcggactaccctgaacagcggttcgctgcatgtaatgtttcaccgctcgtaaaccacctaattcttcaccgcctcctgcgcgaccaggcccaccatgtaccagttgtggcagtggggagccatgcccggtggattcttttgccgactcttcattgaggatctgaattcgcccatgcgtacgtgccgcgtctgcaataaactgacgcgcaatttgcggatcagccgtcaccagcgttcccgcaaggctaccgccgcctgcacaagccagttgcagagcatgtcgctggttttgtgctggcatcagcgttgcgacagggccaaaggcttctgttgcatgtaccgccggtgcttcatccggctgcggacagtacaataaggttggcgggaagaaggcacccgcagcagataaatccgcctgaccaccgaggcgaatctcgcatcctgcagccagcaatatgttcactttttcctgcacatcggcacgctgctcagcatttaccagtgcgcccattttcacgccttcctgagcaggatcaccgaccacgactttctgtaatcgcgcaaccagagcatcactgacagcattaaccaatgcctgcggcacaataatccgccggattgccgtacatttttgcccggcttttgtggtcatctcacgcacaacttcacgaataaacagcgcaaactccggttgatccggggtgacatcttcgcccagtacgcagcagttcagggaatcagcttccatagtgaaggggatagatttggcgacgatatttggctgaactcgcagcatctgtccggtcgccgctgaccccgtgaaagtcaccacatcctggctgtccagatgatccaacaagtcgccagcactaccgcagatcagactaattgcgccttcgggaacaagaccactatcgacaattgatttcaccatcgcctgagtcagttgggccgtcgcggtagctggtttgatgatggctggcattccgcccagccacgttggtgccagcttttccagcattccccagcaggggaagttaaaggcgttaatatgcactgccacgcctgactttgaggtcagtacatggcgcgcggcaaatccaccttctttcgataaggggatcaattcatcttccggccacagcgtatcgtcaggcagctcccggctaccgaggctggcgtaagtaaataacgtcccaatgccaccttcaatatcaacccaactgtctgcccgcgttgcgcctgtttgcgcagaaagagcatagaagcgctctttttcactcagcagatgtttagcgaccgctttaagcatcgccgcacgttcgataaaggtcatagcgcgaagggctggggcacctttttcaatggcaaacaggcgggcagccgccatatcaagaccttcactggtcacttcccataacgcctcgccgctaatagcgtgatgaatcaaacggctacggccccggccagactgccaggtaccggataagaaactggctaactgctgcatcgctactctccagatgtttcacatttctgttgctaatagttaaatcacgaatcataaaaagcaaggcgtattttaacgaaatgttaactatgcgatctgtatatcaaccactaaaaacattaatgcactgatatataa

SEQ ID NO: 242 - DNA, 19129 bp, Escherichia coli
  source 1..19129: mol_type = genomic DNA
tcagataagcctcatcaagatcggcaacaccagtatgaccagaaaagtggaacgccgccgcagctgtagccatcatcgccagattgacaaaaccggcaatcgtcatggcgatagccacatcccatttggtggcggaataacgttgttgacgcgaaccgccatgtaaatgctgagtgagcgaagagtgcaaataaatcacatgcggcataatcgtcgcccctaacacgcctgctgccaggaagaccgcctccgaagtaggtaaactcgggatcaccattcctttacccaactgcgccaggttaggctgggagaaaatcaactcgacaatgtaagccgcggcaacaaacaacagtaacccgccaatcactttctccagcggtttttgcccgcgacgttgcagcattaaaatcaggaaagtcgcgatccccgtcagcaccgcgccctgcaacaacgaaacaccaagaatgagtttaaaaccgatcgccgcaccaataaattccgccaggtcggttgccatcgcaataatttctgcctgaacccaatagaaccacactacgggacgcggatagtgatcacgaatctgctccgccagatttttaccggtggcaatccctagtttggcagagaggatctgaatcagcatcgccatcaggttggcccaaacgacaacccacagtagctgatagccgaagctagcacccgcctgaatattggtcgcaaagttaccgggatcgatataaccaatcgccgcaatgaacgcaggtcccattaatgcgagcctcatcttgcgcgccgcccgtccgctgctactctcaacgcgatagttcgtcatcttgtgcctctaaaacatagcctttgctatgtttcatgctatgccaaacgagaatgattatcaaattcatttgaatggattgtggtgatttctttgatagaccaggattatgactacgaaaagattgatgacttgaatgttatggttatgtttaatgttagcacatttacataactttcagcttccatacacaacatagcagaaatgtatgacagatcactatttttgaagcttgtcacaggacgtcattatagtgtgtgtcagatctcgttttccttaaccatgttacatagaatgtgcacggaaatttaacctgcctcatatttggagcaaatatggaccgcgtccttcattttgtactggcacttgccgttgttgcgattctcgcactgctggtaagcagcgaccgcaaaaaaattcgtatccgttatgttattcaactgcttgttatcgaagtgttactggcgtggttcttcctgaactccgacgttggtttaggcttcgtgaaaggcttctccgaaatgttcgaaaaactgctcggatttgccaacgaagggactaacttcgtctttggtagcatgaatgatcaaggcctggcattcttcttcctgaaagtgctgtgcccaatcgtctttatctctgcactgatcggtattctccagcacattcgcgtgttgccggttattatccgcgcaattggtttcctgctctccaaagtcaacggtatgggcaaactggaatcctttaacgccgtcagctccctgattctgggtcagtctgaaaactttattgcctataaagatatcctcggcaaaatctcccgtaatcgtatgtacaccatggctgccacggcaatgtccaccgtgtcgatgtccatcgttggtgcatacatgaccatgctggaaccgaaatacgtcgttgctgcgctggtactgaacatgttcagcacctttatcgtgctgtcgctgatcaatccttaccgtgttgatgccagtgaagaaaacatccagatgtccaacctgcacgaaggtcagagcttcttcgaaatgctgggtgaatacattctggcaggtttcaaagttgccattatcgttgccgcgatgctgatcggctttatcgccctgatcgccgcgctgaacgcactgtttgccaccgttactggctggtttggctacagcatctccttccagggcatcctgggctacatcttctatccgattgcatgggtgatgggtgttccttccagtgaagcactgcaagtgggcagtatcatggcgaccaaactggtttccaacgagttcgttgcgatgatggatctgcagaaaattgcttccacgctctctccgcgtgctgaaggcataatctctgtgttcctggtttccttcgctaacttctcttcaatcgggattatcgcaggtgcagttaaaggcctgaatgaagagcaaggtaacgtggtttctcgcttcggtctgaaactggtttacggctctaccctggtgagtgtgctgtctgcgtcaatcgcagcactggtgctgtaaaaccatacataaaaaagccggggataattccccggtttttttacgcctgttaatcagctaatggctgcgggcgaccaatcaaatacccttgcagatattgcaccccgagcttatgcaatagcgcctgctgctgttgcgtctcgacaaactccgcgaccacactcaatgacttcgctttcgccagatcggtaattgatctcacaatcatcgcatccagcgtgttcgtgacaatatctttcacaaagacgccatcaattttgatgatatcagcctgcaaacgctttaaccgttcgtagttggcatatccggtgccaaagtcatcaatcgcaatccggaaaccaaacttatgcagctgctcgatgttgtacatgctgctttctgcgttagaaaacgcctgctcctcggtgatctcaagaatgaccgcctgcggggagatgtgataacgcttaaacagacgaataatccgcccggcaatattcttttgcagcagcgtgagcggcattaaattgactgaaaagcgcggtccttttttgtcgcaagggtgtgttgccagccacttcaacaaggattccagcacttgcaaatcaaaacgcgcgctaaggttaaactgagcaataaggggcagaaacttatccggggtcataatgccgccgtcatatttcagtcgcgcgaggatctcatcataaccttcaccctctttgttgcgaattggctgggcgtagagcagcaaatcaccctgatctaacgccgtgcgaatggtattcagcaatagcacctgtttagtggtctgcccggaaaccatctcctctctgctatccagcgccagcacatgatgatgtgcgcaggattgctccgccagccagcttaactgccccaacaagggttgcagggtttcctgatttccatcaaaacgcccccaggcagcaccatagcccatatccagcccggtattgttccagtgaatttgccgactattcaggatgttaatcatatgctggagtcgcccttccgtttnnnnnnnnnncactaacagcagttcactacccggcaattgatacaacttttcgttttcctgcatcaacggcagcagcgtacggcaaattgagcggatacagtgaacgcgcatcattaagccgtaatgacgactcataaactcaagattatcaatgcgcaggcagcaaaaactcttgcccgcctcttgctccggcgcttgttccaacgcacgaaagttgggtaggagcgttaacggatctgtcagcgcctgcaaatgccagcggcgattaagccattcactgcgatgataaatgcgcaccatatagagcaggcaaacgctaaaggaaatcagcaccgcaagaataaatgccagcgaatattcggtttccaccccttgcaaaaagttctggttgtaattcagcaggcaaagcgttgaaacagcccaggtgagatttaaaaacggatagcgaagcttaccgaccccgagggtaaagatgatgaagaaaacgggtaccaagtaaccggcaataaagtcgttttcataaggtgtgcacaacagaagtagcagcacgcttaacgctgccagccagcttaaggtaaatgcgcgtttctctttgcccaacgacggagcgatatccctgcgccacaatatctgcgcaaagtggggacttacaatcatgcgagtgagatagtagaaaagcatgttgtaaatcagcacagcggtgaaaaggcttagcaaatcaacgaccgtgaaaatggcatccgcatcgccgaaaaaggtggatatctttagcgggaaatcaaagaagctccccacaagatacatgctgcatttgatgccgatcggcgtcaccaaaccaagccagaacagacgttgccagacatatcggctggtcaatccataacgccaacgcgtccccagctgccagcgtaatattgcgcaggcacacaacacgacaaacgtctggctaccgagcatgaccgcagtctgtaaaaaagagagatgaaagttccacagattggtgcaaaacatcccgcataaaacgggaacgacaccgcgccagccaaagataaacaagattgacagcattacgcacagtggcatccacgccagaaagatataactggaatggataatggcaagtggcgaaataaaacgggatagctgaataagtaccacggtgagcgtaaacgctagtgtgaatatcttgatattttttatcaggttatgctccacaaacatgagtacactactctcactgatcggggttttcaggcacacaaataataagtttattcgcatcgcgaagcaaacaggggccagcctgttgccgatttttcatccaatgatgctttcaccaggcggcgctaacccggacgtagactgtattacaaaagcggcaaaaagcagagacaaaaaacccccgctttgcagcgagggttggaaatttggtggagctaagcgggatcgaaccgctgacctcttgcatgccatgcaagcgctctcccagctgagctatagccccacgatgcgtttacgtaccaaatttgctgggtgcaaaatttggtggagctaagcgggatcgaaccgctggcctcttgcatgccatgcaagcgctctcccagctgagctatagccccgtcacgtaaagcttgtcgagttgacgggcggcatcatatgaattccgcccgaatgtgtcaacggcaaattgcaacgtgtagtttcaatcgctgaaaaatcaggcaaatgaacaattttggaaaaccgctcgcattcagtagttattcatgtcacggtttcctgtaaagtggtgttataaaatgaactactaatagacccacatacattcagggaattgttatgttcaaggagaggatgacaccagatgaacttgccagactgaccggctatagccgccagaccattaataaatgggtacgcaaggaaggctggacaacgtcaccaaaacctggcgtccagggtggcaaagcccgactggttcacgtcaatgaacaggttcgtgaatatattcgcaatgctgaacgtccagaaggtcagggagaagcgcctgccctttctggtgatgcgccgcttgaagtattgctggtgacactggcgaaagagatgacgccagttgaacaaaaacagtttacatccttgcttctgcgggaagggattatcggattgttacaacgcttagggattcgcgatagcaaataatatgaaaagattacgcaacaaaatgaccaccgaagaactggctgaatgcctcggtgtggctaaacaaactgttaaccgttggatcagagaaaaaggctggaaaacggaaaaatttcccggcgtgaaaggcggtcgtgccagacttattctggtcgatacgcaagtttgcgagtttattcagaacacgccagccttccataacacaccaatgttgatggaagctgaagagagaattgctgaatacgctcctggagcacgcgccccggcgtatcgacaaatcatcaacgcgatagataatatgacagacattgagcaggaaaaagtcgcgcaatttttgtcacgtgaaggaattcgcaatttcctcgcccgtctcgatattgacgaatcagcataaataaaaaacggcaggatattatctcctgccgtttatctttttacacgctaattactgctgattttcgcgttcagcaataaaatccagcgctttgttgatacgctcgatactgcgggtcttaccaattgcgtgaacggtaacatccagtgctggagactgccccgcaccggttacggcgacacgcagcggcataccaactttacccatacccacttccagctcatccgccgtcgcctgaatagcgtgatgaacgttttcagcggtccagtcagtaatcgcggccagtttgtcacgaaccacttccagcggctgacgcgctaccggacgcagatgttttttcgccgcatcggcatcgaactcagcaaaatcttcgtagaaataacggcagctctgtgccatctctttcagcgtcttgcagcgttcgcccagcagtttcaccagatcagccagctgcgggccgttacgggtatcgatattttcctgctcaatgtgccactgtaagtgagtagcaacatactccggcggcagcgcgttaatgtagtgatggttcagccacagcagcttgtcggtgttgaacgcactggcagatttgctgacggcattcaaagtgaagtatttgatcatctcttcacgagtgaagatttcctgatcgccgtgggaccagcccagacgcaccagatagttcagcagtgcttctggcaaataaccgtcatcacgatactgcattacgctgactgccccgtgacgtttggacagttttttaccgtcatcgccattgatcatagaaacgtgcgcgtaaaccggcaccggcgctttcagggccttaagaatgttgatctggcgcggcgtgttgttgatatggtcttcgccacggataacgtgggtgatttccatatcccagtcatcgacaaccacacagaagttataggttggggaaccatcggtacggcggataatcagatcatccagctcctggttgctgaactcgatcggaccacggatctgatcgtcaaaaacaacagaaccttcctgcggattagcaaaacgcacgacacacggttcatcatcagcatgatgctcatggctgtggcggcagcgaccgtcataacgcggcttctcacctttcgccatttgctcttcgcgcagcgcttccaggcgctctttagagcaatagcatttataagcagtgccctcttccagcatctgatcgatcaccgcattgtagcgatcaaaacgtttggtctggtagtacggaccttcatcccactccaggctcagccagttcatgccatccataatggcttcgatagcttccggcgtggaacgctcaagatcggtgtcttcaatacgcagcacgaactcaccgccgtggttacgtgcaaaaagccaggagtaaagagcagtacgcgcgccgccaacgtgcagatagcctgttgggcttggcgcgaagcgagttttgattttcatgaaatggccttacgtttagaaagatgccgacaaccggcaaatcctggaaaaattgagtgggcgatattctatcactcccgcctgattcctcaatgtagttcgggtttctaccttacgcattattgttttcgttgacaaattgcgcaacacggtctgttttgcgatcatcttgcttaaatttacgacgaacgaacaatttctttagaaaatgcgttgactcattttgaactctccctataatgcgactccacacagcgggggtgattagctcagctgggagagcacctcccttacaaggagggggtcggcggttcgatcccgtcatcacccaccaactactttatgtagtctccgccgtgtagcaagaaattgagaagtgggtgattagctcagctgggagagcacctcccttacaaggagggggtcggcggttcgatcccgtcatcacccaccactttctcgccagctaaatttcttgtaaaaatgtgaagtaccgaagtgggtgattagctcagctgggagagcacctcccttacaaggagggggtcggcggttcgatcccgtcatcacccaccacttcgggtcgttagctcagttggtagagcagttgacttttaatcaattggtcgcaggttcgaatcctgcacgacccaccaatgtaaaaaagcgccctaaaggcgcttttttgctatctgcgatactcaaagattcgaacctgcagcaggtttgagttgagcgcagcgaaacaacggagccgctcgcggcgacggcccgaagggcgagcgaagcgagtcatcctgcacgacccaccaatgtaaaaaagcgccctaaaggcgcttttttgctatctgcgatttgcgaaattgcctgatgcgcttcacttagcagacgactatttccggcaattcctgtctcctcacctactgtgtcaatgcagccaacagcttaaccatcgcgggcgtcacctgctgtgtttcataaacaatatataaatctgcagggatgcgctgtttgagcggacggaaaatgacacctggccagttcatttgtgcgtagctgtccgctatcaatgtgataccaatacccatactgaccatggcgagtaccgtttgcggttcattaacttcgcgaataacaaccggtgaaaatcccacctgctggcaaactcgctgcaaaaaatcccagtcagtgtacacgggcggcattgtaacaaaatactcgtcacgtagcgcttccagcggaacggtggaaaatgatgagagatgatgctcttcaggcatcgccaccagaaacgccgattcatgcaaccgtaagctggtaaaacctgtcggtggttctgtcgccattcgccagatcccggcatcgagttcacgtcgttccagcagggccatttgcatcgcgggcatcttttcgcgaaaaagaacttcaacgttaggattttccctgaggaatcgccgcataaccgggcgcatccgtccccacatagccgttcccactacgccgagttcaatccgccctgcttctccccgacctatttgttcaacccgagccaatacattattagcattcaccagcaatcgacgcgattcttccatcaagattttgcccgcgtgtgtcagtacgacgctgcgcgaatggcgaataaaaagctgcgtgccgagttgattttccagctctttaatatgaatactgagcggaggctgagacatatttaaacgcgctgctgcgcggccaaaatgcaactcttccgctacggcaagaaaataacggagcaacttaagatctgttctgtatacgcgttccataattaagtgctccatataataaatacatcgtattaaattatcatggcataaagtatttcaccaccagatatccgacatacataaacacaatggataatatacctggtaatacatttggtacaggaataggcaagcgcacgattgtaaacaaagcaccaatgccaaaaccaacgccggaagaaaataaaatatctttcactaattaacctttatcataaaagcagctctgaagagcagagctgcgaatccttttaatgagccaccgctcgatgctttatcttttcagggtcatgattatatttaaacccaaagaaaaatatcactgcgagaaaaagagcatatcctgcaaacaccagccagatagtttgccagtcttttacgccatccaccgaaaagtaatctactgccatgccactcagaatcgagccaacccatgcgccgacaccatttaccatggtcataaagagcccctgcgcgctggcacgaatgctggaatcaacttcctgttcgacaaataccgaaccagaaatattgaagaaatcgaatgcacagccataaacaatcatcgacagcagcagcaaaataaatccggttgttgacggatcgccataggcgaagaagccaaagcgcagcgtccaggccaccatactcatcagcatgacggctttaatgccaaatcgctttaaaaagaatgggatagtcagtataaagcccacttctgccatctgtgaaactgacagtaaaatggagggatatttcaccacaaaactgtcagcaaactccgggttacgggcgaaatcatgtaggaacggattaccaaaaacgttggtaatttgcagtaccgcacccagcatcatggcaaagaggaaaaagatggccatgcgtggatttttaaacagcacgaaggcatccagacccagcttgctggcaagcgatgtggtcgcttttttctccgcaaccggaatcttcggcaaagtcagcgcataagccgacagcagcaatgacgcaccggacgcgatatacagctgcagactactcaattccagatgcagcaggcttactgcccacatcgcgacaatgaaccccaccgtaccaaaaacgcgaatgggcgggaaagcggtcaccgggtcaagccctgcctgggcaagacaggaataagagacgctgttcgataacgcaatagtcggcataaacgccatcgcattgactaacatcacccaaaacatcatatccggatcagttacggatgccgcataaaaaagtacgcccgcacacaccaggtgacacagcatgtatgcacgttctgcgcgcagccatttgtctgcgatgatccccattataccaggcataataatcgcggcgatccctttggaactgtaaaccatgccaacattagcgccggtgaaatgaagggtattaatcatgtaagagccgagggtaaccagccagctcccccagataaaatattgcaaaaaggacattacctttaagcgcatcgcgatgctcataatcgtttccttgtcgcatcatttggcctcacccgcgaggccgtttcttattgtttttctcaggcaattttgcgcagaaagccacaaataaggttgatgaagttctgcttagagagctccgcagccgccagcgtttgcgcatgtgacaatttcacatcgcttaaaccttccgccatattggtaatcgcagagaccgcaacgactttaaggtcgcaatggcgagctgaaataacctcaggcaccacagacataccaacaacatccccaccaataatttgcatcatgcgaatttccgccgcagtctcgaaattcggccccggatacgagacgaacacgccctccgtcagagggaaaccctcttctttcgccactttttgtaacagtgcgcggtattccgcatcgtaggcatttgccagtgagaagaagcgctctccaaaacgatcatcgttaagacccaccatcggcgtaccgggcatggtgttgatatgatctttcaatgcgaccaggctgcctgcccccacttccggacgcagcgagcctgccgcattggtgcagaacagtagctcgcagcccagcagcttaaaggtacgaattgcgtcagtcataatggtcattccacgaccttcgtagaaatgtccgcgacctttcatacataccaccggtacgccctggagatggcccagcactaactcccccgcatgaccatgtaccgtacttaccgggaagcccggcagcttttcgtaggaaattgcgacagcgttctcaatctgatcggccagcgcgccgagcccggaacctaaaataaaggccactcgtggcgtgaaatcaggtttataagtcttgataatatctatgcaaaacagcgggttatgagaaaattgaacctgagacatacatatcctttttctgtagggtggaatctaacgcctttttatagcgaggttgtcccggctcttaccaatacacttttctcacgcattcaatagcgattcgatatcgatggatttatatcttttctctattaatccacggtaaaaactgtattggcgatattaattcctttgcattaacaatatgtcgtttttagcaaaccactttattaagcaatctactaataacgatcggcatagggaattatgctatgaaaaaacatcttttaactctgacactttcctctatattagcgatacctgttgtatctcatgcggaatttaaaggcggttttgcagatatcggcgtgcattatctggactggaccagccggactaccgaaaaatcgtcgaccaaatcacacaaagatgattttggttatcttgaatttgaaggtggcgctaactttagttggggagaaatgtacgggttcttcgactgggaaaacttctataacggtcgccataataaaccaggtagcgagcagcgttatacctttaaaaataccaaccgtatttacctgggtgacaccggatttaatctctacttgcatgcgtatggcacctacggttctgcgaatcgcgtgaatttccacgacgatatgttcctgtacggtatcggctacaatttcaccggcagcggttggtggttcaaaccgttctttgctaagcgttatacagatcaaacctattacactggcgacaacggctatgtcgccggctgggttgcaggttacaactttatgctgggcagcgagaaattcactcttaccaactggaacgagtacgagtttgaccgtgacgctacctatgcagcgggtaatggcggtaaagaagggctgaatggcgcagttgcactgtggtggaatgcaacatcacacattactacggggattcagtatcgatatgcggatgacaaactgggcgaagatttttaccaggatgcgataatctactccatcaaatttaacttctgattgattactgccggggctcccggcagtatgaattcactctatatctgatacaacggatccccttcccgaccagccattagcgcattgccctggtctcgtaccacgtcccataacgcttcagcggcggtggaaagtgaacggttcttcctgcgcaccagcatcaactggcgttcaacaaccggcgtaatgcgctttaccaccagtgggctaccttcaggcaatggtagcgccagtgcgggaagaatactgatgccgatgcctgcggctaccatcgggaacagcgtcgccggatgtccaatctcctgcacaatattcgcctgaataccattgcgcgccagcgctgcgtcaatcagcggtcggctgcctgacgcgtaatcctgcaacaccaatttcgctccctgtaatgcctgccagggtacataatcttcgacggccaaagcgctatcgcgatggcaaagcagaaagaaaggctcggaaagaatcgcttcacattgcagatcgcccactgggcctggatcgatgacgatgccaaagtcgacatctccctggcgaatactttccatcacccactgctgcggacgatcgtgcaggacaaactgaatatctggatagcggcgatggctttcagcaatgcattgcggaataagatgcgcggaaatggtctggctggcagcgacccgaacttttccgctcagttgttgccccatacgcccggtatcgcgcaacgtgctgttcagttcatccagcagtcgctcaagacgcaaagccagctgctgccctgcatctgtaagcaccacttcacgcgtggttctgtccagcaggcgaacaccagtatgattttccagttccttcacactgtgactcactgccgactggctcaggccgatacgctctcctgcacgactaaaacttttctcctgcgctactgtgacgaaaacctttaattgttttaaagaataattcatctgttttcttcatgaatggatgcaataaatcaattttatttctcaaactggaagaagcacaatagaaccatcgatcatctggagtctttatgaaactttttcgtatcctcgatcctttcaccttaaccctgatcacggtggtgttgctggcctctttctttccggccagaggcgatttcgtccccttctttgaaaatctgaccaccgcagcgattgccctgctgttctttatgcacggcgcgaagttgtcgcgtgaggcgattattgctggcggtggtcactggcgactgcatttgtgggtaatgtgcagcaccttcgtgctgtttccgattctgggtgtactgtttgcctggtggaaaccggtaaatgtcgacccgatgctctactccggttttctctacttgtgcattctcccggctaccgtgcagtctgcaatcgccttcacgtcaatggcgggcggtaacgtcgcggcggcggtttgttctgcgtcagcatccagcctgctggggattttcctttcaccattgctggttggtctggtgatgaatgttcacggtgcagggggcagccttgagcaggtcggtaaaattatgctgcaactgctgctgccgtttgtgttggggcatctttcccggccgtggattggtgactgggtgtcgcgcaataaaaaatggattgcgaaaactgaccagacgtccattctgttggtggtttatacagcgttcagcgaagccgtcgttaatggtatctggcataaagttggctggggatcattgctgtttatcgtggtggtcagctgcgttcttctggctatcgtgattgtagttaacgtctttatggcacgccgactgggcttcaataaggcagatgaaattactatcgtcttttgtggttcgaaaaagagtctggcaaatggcatcccgatggcaaacattctgttccccacatcggtgatcggtatgatggtgctgcccctgatgattttccatcagatccaattgatggtctgtgcggtgctggcgcgtcgatacaaacgccagaccgaacagttacatgcnnnnnnnnnncaggaaagcagcaccgataaagcttaaagcggacgcttcaggggctggaccagttgcgtcagcccctcggttttaatcagcagcgtgatttgcattagctcaccgagcttccctgccgggaactcatctttgcgggcaaaccacagcagatactcctccggcaggtcgattaagcgacgccctttgtatttgccaaacggcattatcgtattggctatttcaatcagctgctctttttccatctcagctacccagcaaacgcagcatttccgcttcgtcgatgacttcaatgcccagttcctgcgccttcgccagtttagatcctgcagcttcacccgctatcaccagatcggttttcttcgacacgctgcccgcgactttcgcacccagttcgaccagtcgagctttagcgtcatcacgtgacatctgacttaagctgcccgtaagcaccacggttttaccagcaaacgggctgtcaatctcttccgcgttgataacgatcggcgcaggccagtggacaccttccgccaacagctcgctgataacattgcggttgctttcttcggcaaagaagttgtgaacgtgggatgcaacgacaatgccaacatcaggcaccttttgcagctcttcaatcgaagcggcttccagcgcttccagcgtgccgaaatatgccgccagacctgctgcggtggcctcgccgacttcacggatgccaagtgcatagaggaagcgagcaaaggtggtttctttcgctttttctagcgcgttaaccacgttttgtgccgattttggccccatacgctccagtccggtcagtttgcctgcggtgagtttgaacagatctgccggagtatggacatattctttttcaaccagctgatcgatgattttgtcgcccattccgtcaacatccatcgcacggcgggaaacaaagtgtttcagcgactctttacgctgcgcaccgcaaatcaggccaccggtacagcgggcaaccgcttcaccttccacacgctcaacgtcagaaccacataccggacaatgcgttgggaatacaacctcacgggtatcttccgggcgttcagaaagcacgacgttaaccacctgcgggatcacgtcgccagcgcggcgaatcaccactttatcgccaatgcgtaaaccaagacgttcgatttcatccgcattgtgtaaggttgcgttactcaccagcacgccagcaacatggacaggttccagacgcgcaacaggcgtaatcgcgccagtacgcccaacctgaaactcgacgtcacgcacaaaggtcatctgctcctgcgccgggaatttaaacgctaccgcccagcgcggggcacgcgcgacaaagccaagctgctcctgctgttccagtgagttgaccttaatcaccacgccgtcgatatcaaagcccagcgtcgggcggtcttcttccactttgtgatagaacgccagcacttcttccgccgattcacaaagcgttacccgatcgctgaccggcaacccccactttttaaattgcagtaaacggccaagatgagtatccggcagctcgccaccttccagaacaccaacgccatagcagaaaaaagtgagcggtcgcttcgctgtaatacgcggatcaagctgacgaagtgaaccagctgccgcattacgtgggttagcaaaaactttcccgcccgtgcgtcgcgcatcttcgttaatcttttcgaaccccgcctgcggcaggaacacttcaccacgcacttccagacgcgccgggatattctctccgtgcagcttcagcggaatagcgcgaatagtacgcacattagacgtgatatcttccccggtggtgccatcgccacgggtcgcggcactgactaaaacgccattttcatacagaatactgacggcaaggccatccagcttcagctcacagcaccaggtgactttctcgttgtttttcagacggtcctgcacacgtttgttgaaagcaagaaagctttcttcatcaaaaacgttatccagtgacagcattggtacttcatggcgtatctggctgaaagccgccagcggcgcagcacctacacgttgggtaggcgaatcaggcgtaatcagttctggatgtttggtttccagctcgcgcagttcgcgcatcagcctgtcgtattcagcgtcgggaatttccggcgcatccatcacatgataaagatattcatgatggcgaagcgtcgttcgcagttctgtcagttgttgttcgattgattccatatcgcaccatcaatgctaaaaacccccgacaagcgggggttcgaagaggagttaatttgccttaagtgtatcaggcgttggcgtctttgacttcgcggatgatgtcctggtactcgcgcaatttctgcggagtcatcatacggcgctgatcgtcaagcacgacaccgcccacttcatcggcaatatgctgcgcagattgcagcatcagcttgaagttctgcagctcgtcaccgtaagacggtacctgcataaagatggtgacacccggagtagtgaaatccttcatttcaggatcaaaggttcccggtttcaccatattcgccaggctgaataacgccgggccgctgccatccgggctaagatgacgatggtaaatattcatatcgccaaaaatgaagcccgcttgttgaatgctgttaagaagcagttcaccgtttagctcgctaccgtgatgcgccgcgacgttcatgataatcaccgcttctttgcgcttcggtttatccataactggagccggttccgctacaggctcaggctgtggtgccgctacgggttctgcaggctggaaagcctgttgtgccggttgcggtgctgaatgcacaggctgcggcgctggcgcgacctgtggcgaaactggctgctgcaacggctgttcaggctgcggctgataggcaggctgctgcaccggctgcgctggacgcggagcatgttgcggcggtacctgcgcttcaggcggctgctggaccggttgacgcggctgcgcagacgcataaggcggttggtactggtgttgcggcgacggacgagcagcctcatgctcctgagcgttagccggggcatgattcacgcggtgaacacgaacctcaccaacgccctcatcatcttcgacatcctcgtcataagaatcgtcgtcacgttttgacttcattcgttttaatggccgatcgcggaacatagaagatcgttctttacggctggtccagaaaccatgtaccagtaaagcgattatggcgatcgcgccaacaatgattaatatcagacgcaaatcctgcatcattatattctctgttgttctaacaccttgccaccacggcaaacatttactcactaagagtatttgccgattacctcaagtgcaagtgcactattaactttcacagcacaaagatagatgaaatcgtgctttttgctgttttttcgaacatatcctaactgtccattgcgcaattacccggtaaaatacgcagaattttcctgggattggtcaaaaggagctcatcctgattatggtttcatcattcacatctgccccacgcagcggtttttactattttgcgcaaggctggaagctcgtctcgcaacctgggattcggcgtttcgttattttaccgctgctggtcaatattttgttgatggggggcgcattctggtggctctttacacagctcgatgtctggatcccgactctcatgagttacgttccggactggctacaatggctgagttatctgttgtggcctctggctgtcatctctgtgctgttagtgtttggctatttcttctccacgattgctaactggattgccgctccgtttaacggtttattggctgaacaactggaagcacgattgactggcgctacaccgccagataccgggattttcggtatcatgaaagatgtgccgcgaatcatgaaacgcgaatggcaaaaatttgcctggtatctgccgcgcgcaattgtattgctaattctttacttaatccctggtattgggcaaaccgtcgcgccggtactgtggttcctgtttagcgcctggatgttagccatccagtattgcgattaccccttcgataaccacaaagtgccgtttaaagagatgcgcaccgccctgcgcacacgcaaaatcaccaatatgcagtttggtgctttaaccagcctgtttacgatgatcccgctgcttaatctgttcatcatgcccgttgccgtttgtggcgcgacggcgatgtgggtcgattgctatcgcgataaacacgcgatgtggcggtaacaatctaccggttattttgtaaaccgtttgtgtgaaacaggggtggcttatgccgccccttattccatcttgcatgtcattatttcccttctgtatatagatatgctaaatccttacttccgcata

SEQ ID NO: 243 - DNA, 18864 bp, Escherichia coli
  source 1..18864: mol_type = genomic DNA
tttgttttataaggataaattaactaaaatggcaccatcaacaaaaccggaagaggtgctcgcgatgtttcattgtcctttatgccagcatgccgcacatgcgcgtacaagccgctatatcactgacacgacaaaagagcgttatcaccagtgtcagaacgtgaattgcagcgccacgttcatcacttatgagtcggtacagcgatacatcgtgaagccgggagaagtccatgccgtaaggccgcacccgttgccgtcaggacagcaaattatgtggatgtaatcacaaaaatagcccctcagttgaggggctttatttatggtcgatgtggacgctatgtggacagcgtttgatataaatccatttatatcatcaggttaggtgcttttttgtgacaccatccctgtcttcccccacatgatgtgggggttttttttatcctcaatttgcctgctgcttaatgcattgcagatgatttgcttccgttatactagcgtcagttgatagcgggagtatttatgaatcaatcttatggacggctggtcagtcgggcggcgattgctgcgacggcgatggcttcgctgctattgctgattaaaatttttgcatggtggtataccgggtcggtgagtattctcgccgcgctggtggattcgctggtggatatcggcgcgtcgttgacgaatttactggtggtgcgatattccctgcaacctgccgacgataatcactcgtttggtcacggtaaagctgagtccctcgcggcgctggcgcaaagtatgtttatctccggttcggcactattcctgtttttgacgggtattcaacatctggtatctccaacaccgatgacagatccaggcgtcggggttatcgtgacaattgtggcgctaatttgtacgattatccttgtctcgtttcagcgttgggtggtgcgccggacgcaaagccaggcggtgagggctgatatgctacattaccagtctgatgttatgatgaacggcgcaattctgctggcgctggggttgtcctggtacggctggcatcgcgccgatgctctgtttgcattgggaatcggcatctatattttatatagcgcgttacgcatgggatatgaggcggtacagtcattactggatcgcgcattgcctgatgaggaacggcaagaaattattgatatcgtgacttcctggccgggtgttagcggcgctcacgatcttcgcacgcggcagtcagggccgacccgctttattcagattcatttggaaatggaagactctctgcctttggttcaggcacatatggtggcggatcaggtagagcaggctattttacggcgttttccgggatcggatgtgattatccatcaggacccctgttccgtcgtacccagggagggtaaacggtctatgctttcataatcagtataaaagagagccagacccgcattttgtgtataaaataccgccatttggcctgacctgaatcaattcagcaggaagtgattgttatactatttgcacattcgttggatcacttcgatgtgcaagaagacttccggcaacagattttattttgcattccaaagttcagaggtagtcatgattaagaaaatcggtgtgttgacaagcggcggtgatgcgccaggcatgaacgccgcaattcgcggggttgttcgttctgcgctgacagaaggtctggaagtaatgggtatttatgacggctatctgggtctgtatgaagaccgtatggtacagctagaccgttacagcgtgtctgacatgatcaaccgtggcggtacgttcctcggttctgcgcgtttcccggaattccgcgacgagaacatccgcgccgtggctatcgaaaacctgaaaaaacgtgggatcgacgcgctggtggttatcggcggtgacggttcctacatgggtgcaatgcgtctgaccgaaatgggcttcccgtgcatcggtctgccgggcactatcgacaacgacatcaaaggcactgactacactatcggtttcttcactgcgctgagcaccgttgtagaagcgatcgaccgtctgcgtgacacctcttcttctcaccagcgtatttccgtggtggaagtgatgggccgttattgtggcgatctgaccctggctgcggccattgccggtggctgtgaattcgttgtggttccggaagttgaattcagccgtgaagacctggtaaacgaaatcaaagcgggtatcgcgaaaggtaaaaaacacgcgatcgtggcgattaccgaacatatgtgtgatgttgacgaactggcgcatttcatcgagaaagaaaccggtcgtgaaacccgcgcaactgtgctgggccacatccagcgcggtggttctccggtgccttacgaccgtattctggcttcccgtatgggcgcttacgctatcgatctgctgctggcaggttacggcggtcgttgtgtaggtatccagaacgaacagctggttcaccacgacatcatcgacgctatcgaaaacatgaagcgtccgttcaaaggtgactggctggactgcgcgaaaaaactgtattaatgatttcggaaaaaggcagattcctttagcctgaaaccgatgacagaagcaaaaatgcctgatgcgcttcgcttatcaggcctacatggattctgcaatttattgaatttgcaaacttttgtaggccggataaggcgttcgcgccgcatccggcatggacaaagcgcactttgtcagcaatatgaggcggatttcttccgcctttttaatccctcaacatatacccgcaagttatagccaatctttttttattctttaatgtttggttaaccttctggcacgctttgctcatcacaacacaacataagagagtcgggcgatgaacaagtggggcgtagggttaacatttttgctggcggcaaccagcgttatggcaaaggatattcagcttcttaacgtttcatatgatccaacgcgcgaattgtacgaacagtacaacaaggcattcagcgcccactggaaacagcaaactggtgataacgtggtgattcgtcagtcacacggtggttcaggtaaacaagcgacgtcggttcaacggtattgaagctgatgttgtcacgctggctctggcctatgacgtggacgcgattgcggaacgcgggcggattgataaagagtggatcaaacgtctgccggataactccgcaccgtacacttccaccattgttttcctggtgcgtaagggcaatccgaagcagatccatgactggaacgatctgattaaaccgggtgtttcggtgatcacgcctaatccgaaaagctctggtggcgcacgctggaactacctggctgcctggggctacgcgctgcatcacaacaacaacgatcaggcaaaagcacaggattttgttcgggcactgtataaaaacgtcgaagttctggattctggcgcgcgcggctccactaacacctttgtcgagcgcgggattggcgatgtactgatcgcttgggaaaacgaagttctgctggcagcgaatgaactggggaaagataaattcgaaatcgtcacgccgagtgagtctatcctcgcagagccaaccgtgtcggtggtcgataaagtggtcgagaaaaaaggcaccaaagaggtggcggaagcctacctgaaatatctctactcgccagaaggtcaggaaattgccgcgaaaaactactaccgtccgcgcgacgctgaagtagcgaaaaagtacgaaaatgcgtttccaaagctgaagttattcaccattgatgaagagttcggcggctggacgaaagcgcaaaaagagcattttgctaacggcggtacgttcgatcagatcagcaaacgctgatttctccaggataattatcaaacccggtggtttctcgcgaccgggttttttatttgtcacgattttgcgttacccttgcatctctttgaggtacagggaaaaaaagatgaaaaaagcgggtcttctttttttggtgatgatagttatcgccgttgtggctgccggtattggttactggaaattaaccggtgaagagtcggatacattacgtaagattgtccttgaggaatgtttgcccaatcagcagcaaaatcaaaatccttcgccatgtgcggaagtcaaacccaatgccggatacgtggttttaaaagatcttaatggcccactgcaatatctgttgatgccaacgtatcgtattaacggtactgaaagtcctttgttgaccgatccttcaacgccgaacttcttttggttggcctggcaggcgcgtgattttatgagcaaaaaatacggccagccggttcccgatcgcgcggtttctttggcgatcaactcccgcaccgggcgtacgcaaaaccattttcatattcatatctcttgtattcgtcctgatgtgcgcaaacaactggataacaatctggcgaacatcagcagccgctggttgccactgccaggtggtttgcgcgggcatgaatacctggcgcgtcgggtaacggaaagcgaactggtacaacgcagcccatttatgatgctggcagaagaagtacctgaggcgcgggaacatatgggaagctacgggctggcgatggtacggcagagtgataactcatttgtattgctggcgacacaacgaaatctactgacgcttaaccgtgcttcagccgaggaaattcaggatcatcagtgtgagattttgcgttaaggcgaagagttaaggaaagtaagtgccggatatgaaatccggcacctgtcagacttaagcctgtttagccgcttctgcagctttaacgatcactgcgaaagcgtcagctttcagagaagcaccgccaaccagcgcgccgtcgatatctggctgagcaaacagttctgcagcgttagacgcgtttacagagccgccgtactgaatgatcacttgttcagcgatgttagcgtcaactttagcgatgtggtcacggatgaatttgtgaacagcctgtgcctgagccggagttgcagatttgccagtaccgattgcccatacaggttcgtaagcgataaccgcaccttcgaatgccgcagcaccctgagttttcagtaccgcgtcgatctgacgtgcgcaaacttcttcagttttgcccgcttcgttttcagcttcggtttcaccgatgcacagaaccggagtcaggccctgctctttcagcaccgcgaattttttcgcgatcagttcgtcagactctttgtggtaagtacgacgttcagagtggccgatgatgatgtactgagcgccgatgtctttcagcatagcggcagaagtttcaccggtgaatgcgccggacaggttcaggtccacgttttgcgcacccagcatgatgtggctgccttcagcttcgcgcttcgccatatcgatgtacatttccggtggtgcgattgcaaccgcacagccagcaacacctgccagctctttacgcaggttagaaaccagctcgtgaaccatgtggcggctgccgttcagtttccagttacccatcactaaaggatgtcgcattttaattctccacgcttataagcgaataaaggaagatggccgccccgcagggcagcaggtctgtgaaacagtatagagattcatcggcacaaaggctttgctttttgtcatttattcaaaccttcaagcgattcagatagcgccagcttaatcggttcaacagcgaaggtcagccccttttcgccgttgtccgcgacaacataacgcagtgcaccttctgtctcggtgtaataacgtttgtttttccccgccgttagcagcgactgcagttttttctggctttgtgttttggtcattaatggggtgagtgtgcggatcactgctgccatgtattcctgagctttcgctttcgctgctttttgctctggcccctggatgggtagccaggtcatttgaatgcttttgatttttaaggtaccgcgctccagcgctgtagaagcatacaagttctcgttaattttacttgcagcacgagtgagattggctttgtcgggactgctgtcgatggcacgaaattcgttcagtggcaggctaggattctggctgttaaagtcttctcgaaactggctgatggagagatcgaaagtaggggctccagccagcagataaggcgcggtcgttgccgtatctggtgtttgtgcatgcgccgttgttgtaacggttaatgcagaacataagagaaaaaacagcgtacaccctggcttcattgacagtaccttttgttatgactggctccgattaaaacgatatctgtcgcccttgtcaaaagggtagaatcctggaaaagacaaccatcaaggaacttacatgaccatacagcaatggttattctcatttaaagggcgtattggacgccgtgatttctggatttggataggcctgtggttcgcaggcatgctggtgcttttctcactggcgggtaaaaatttactcgatattcagaccgcggcgttttgccttgtgtgcttgctttggccaacagcggcagtaactgttaagcgcttgcatgatcgcgggcgttccggcgcatgggcatttctgatgattgtggcgtggatgctgctggcgggtaactgggcgattttaccgggtgtctggcaatgggcggtggggcgttttgtcccgacgttgattctggtgatgatgcttatcgatcttggtgcgtttgttggcacacaaggcgaaaataaatatggtaaagatactcaggatgtgaagtataaagccgacaataaatcaagtaattaacctttaatatatctcttactgctatttttttcctggattgttatttccacgatgcaaatgacaatacccggaaaatccttctgaactcttcaccttaagcaatatcaaaaaaaatggtaatccataagatcattacttgtttgttcttcccttaacggcgcattattcttaagtcgtaatcgacagagaggcgaatatacagaggtgccctatgaaagatgtcgtagataaatgcagtactaaaggatgtgcgattgatatcggtacggtgattgataacgacaactgtaccagtaagttttcgcgcttttttgccacccgcgaagaagcagagtcttttatgaccaaactgaaagagcttgccgccgctgcatcctctgcagatgaaggggccagcgtggcctacaagattaaggatctggaggggcaagttgagcttgatgcggccttcactttctcatgccaggccgagatgattatttttgagttatcactgcgttcgttagcttgatggagttgctttagaaggagttaaacatggcttataaacacattggcgtggcaatttccgggaatgaagaagatgccttactggtgaataaagctctggagctcgccagacataatgacgctcacctgacgttaattcatattgatgatggcttaagcgagttgtatccgggtatctacttccctgcaacagaagatattcttcaattgttgaagaataagtcggataacaagctgtataaactgacgaaaaatattcaatggccgaagacaaaactgcgtattgaacgcggagaaatgccggaaacactgctggaaattatgcaaaaagagcagtgcgacctccttgtctgtggtcatcatcactcatttatcaaccgtttgatgccggcatatcgcgggatgatcaataagatgagtgcggatttgctcatcgtgccgtttatcgataagtaaccgcttaccagtaatgctccgctgtcatatggcccggtcggcgacgtaaatgtttcgtcatctgccgggtctctttcagcaactgttgtgtatcgcgcaccatctgtggattgccgcacagcatcacatggctggtttctttattcatcggcaggccaatcgcgctttccagttccccactttcaattaacgccggtatccgcccggtgagcgaccccgctgccgtttcccgactgaccaccgtctgaatgcgcagtttcccttcgtagcgtttttccagttcttgcatcagtggcaaatagcttaagtcggcggcataacgtgcggcgtgaaccaggaccagatttttgaagcgatctaaatctttgcctagttgcagaatcgataaataagggccaatcgctgtaccggttgccagcatccatagcgtttcgcagtccggtacttcatccagaacaaagaagccagctgcttcgctaaccacctgcacttcatcgcctggtttcagtgccgccaatcgtgggcttaatttgccatcggggacggtgaccaggtaaaactccagatcgggattatcgggcgagttaacataggagtaggcgcgctggacgcgttcgccgtcgatttcaaggccaagcttggtgaattgcccggcggtaaacggaagcacgggggcgtgaacggtgagactaaacagggcgtcggtccagttctgcactttagtgactttgcctgttacccaatcagccatgtttttctcctgttttgattaacttgccttatcttcgttctccgaacaaaaaaattccagtcccgaaggactggaaggctcaatcgatcaaatcaatcagaggatgtgcacctgcatttccgggtctttgcgatccagatagtggatggactgaatgcggcgaatggtgcgtgacttgccgcggatcagcagcgtttcggtagtcgcgatattgcctttgcggctaatgccttccagcagatcgcctttggtaataccggtggcagagaagatgacgttatcgctgcgcgccatatcgcccaggcgcaatactttaccggcttcgatgcccatcgctttgcagcgtgccagctcctgctcgccaatgcgacgattctcttcgttgtcgcctttgacgtcatgacgcgccagcagacgaccgttcatgtcgccatctaatgcgcggatcaccgccgcagaaactacgccttccggcgcgccaccaataccgtacagcacgtcaacttcgctgtctggcatacaggtgagaattgaggccgcaacgtcgccgtccggaatagcaaatacgcgtacgccgagttgctgcatttcagcgataacggcatcgtggcgtggtttagccagaatcgttaccgtcagttcgctcaacggtttgccgagcgccgccgctacattgcgcaggttatccgccagcggcaggttcagatcaatggtgcctttggctcccggcccgacaatcagcttctccatatacatatccggcgcattgaggaagcagcctttatcgcctactgccagcaccgccagcgcgttagcctggcccatcgccgtcatgcgcgtgccttcaatcggatcaacagcaatatctaccgcgtcgccgcgaccagtaccgactttttcaccaatgtagagcatcggtgcttcgtcgatttcaccttcaccaatgacgatggtgccgtcaatgttgacctggttgagcataatacgcatggcgtttaccgccgcgccgtccgcggtgtttttatcgccgcgtcctaaccatttgtagccagccagcgccgctgattcggtgacgcgggaaaattcgatggcaagttctcgtctcatagcaaactctaagcagtaaggaatggcgcgaagtgtagcacaggggaagggagggattattgatgtgtgcggggttgcccccgcacgtttcgggactaccggatgcggcaaaaacgcttcatccggcatacattactcgtcgtgttcttcccacgccatcgcgcgtttgaccgcttttttccagcctgcgtaacggtaattacgctcagtggtttcgatgcctggacggaactcgcgctcaatcaccgctttctcttgcagctcgtcgaggttctgccagaagccaaccgccagaccagcaagataggccgcacccaatgcggtgacttcgcgcacttccgggcgctcaacgcgcgtaccgagaatatcggactggaactgcatcaggaaattgtttgctactgcgccgccatccacgcgcagggcgtgcagacgaataccagagtcggcctgcattgcttccagcacgtcacgcgtctgataagcaatagactccagcgtcgcgcggataatgtggttcgcgtttaccccacgagtcagaccgaaaatcgccccgcgcgcatacgggtcccagtacggcgcacccagcccggtaaatgctgggaccacatatacgccgttggtgttttgcactttggtggcaaagtattcggaatcgtacgcgtcgttaatcaacttcatctcatcgcgcagccactgaatggatgcgcccgccataaacaccgcaccttccagcgcatagttcacttcgccagtcgggccgcaggcgatggtggtcagcaggccgttttctgatttcaccgctttctcgccagtgttcatcagcataaagcagccagtgccataggtgttcttcgccatcccttctttcacgcacaactgaccaaacagcgcggcctgctggtcaccggcgatcccagagattggaatacgcgtgccgcctttgccgccaatgttagtctgaccgtacacttcggaagaacgacgcacttctggcagcatctcgcgcggaatatccagcacttccagcattttgtcgtcccagtccagggcatggatgttgaacaacatagtacgagaggcgttggtgtaatcggtcacatggacacggccctgagtcattttccagataagccacgtatcaaccgtaccaaacagcaattcaccacgacgcgcacgctcgcgagagccttccacatgatcgaggatccacttcaccttggtgccagagaagtacgggtcaatcaccagaccggtattgctacggatataatcttctaaaccgtcacgttttaaatgctcgcagatttctgcggtacgacggcactgccagacaatggcgttatagatgggcttgccggtttctttttcccagacaatagtggtttcacgctggttagtgataccgatagctgcaatttgatcggaactgatatcggctttcgccagcacttctaccagcgtggagctttgggtggcccagatttccattgggtcgtgttctacccagcccggttttgggtagatttgctcaaattcgcgctgcgacacgctaatgatattggcatcgtgatccatcacgaccgcgcgggagctggtggtgccctggtcgagcgcgacgatatattttttttcagtcatgtttagttgtcccgtagtcacattacagcgaagctttttgttctgaaggagttgtggtttccttttcttccacaacacagatatcgcaaggcaaatggcgaccaatcagtttgcggtaggcaaatgcacctacaatcgcgccaacgatagggccgaaaagcggcaccaggaagtaaggaatgtctctgccgccggtaaaggcgacattgccccagcccgccagccaggcaaagactttcggaccaaagtcacgcgctgggttcatggcaaaacccgtcaatgggcccatagatgcgccaatgaccgcaatcagtagaccaatcagcaagggagccaaagggccgcgtggtacaccgttgccatcgtccgttaacgccaggatcagccccatcagaatagcggtaatcaccatctcaactgcgaaagcctgcacaaaattgatatgaggattagggtaagtagagaaagtgccagccagatcaacactttcaacgctgccgcgaacaatgtgatgagtctgctcgaagtcgaaaaataaattgtagtaaagcccgtaaactaaagccgcagcgcagaaagcgccggcaacttgtgaaacgataaaaggaataactttgcgcttgtcgaaacaggcaaacagccacaatgcaatggtaacagcgggattaagatgcgcgccggaaacccctgcggtcaggtagatagccattgccacccccagtccccaaatgacactgatttcccactgaccaaaagacgcaccagcgacttttagtgctgcaacgcaacccacaccgaaaaaaatcaacaacccggtaccgaggaattcagcaatgcactggcctttcaaggttgatgtttgactcataatcggatcctgaagagttaatgtttgttgtatgcgtgaaagtcacggacctccacgatgcttgtaggcatgctgtaaacttatcgttaacgagcaaaaacgagaaatatcgaacttaaaatgtgtgtgcttcgtcataaaatgagcgttatcgcgccatttattccatctgattgtacatgatgcatgtttgttagatcattcgcgcaacaaatttattaacattttcgattggtgtggattatgtctccaggagaaggatgaaaagtgtggcaaaccgtaatctgcaaggcgtgccgctggacagcgatggcgcggcttcatacaatcggagctaactaaagtgcgctcgtatttattaaggcgtcaccggtaatcgggacgaggattttttatccatcaacgccttgcaattcaggagaggtatgacaatgtcattagaagtgtttgagaaactggaagcaaaagtacagcaggcgattgatacaatcactctgttgcagatggaaatcgaagagctgaaagaaaaaaacaactcactgtcgcaggaagttcaaaatgcccagcatcagcgcgaagagctggagcgtgagaacaaccatctgaaagaacagcagaacggctggcaggaacgtctgcaggccctgctgggtcgcatggaagaggtctgattacgcttcatctttcgcgtaatttctttactgtgtaggccaacaggtaacgcagaaaaaaggcaccttgcggtgcctttcttatcattcaatatccagcggatcttctgaaagaataatcccggtattgtcggcataaagatggtcgccggagaagaaggtgacaccgccaaaattgacgcggacatcgctttcgccaatgccttcgccagcggcaccaaccggaattgccgccatcgcctggatgccgatatccaactcttccaggtcatctacctgacgcaccgcgccgtaaataaccagaccttcccattcattttgtactgccagacgcgccagttcagcatcgaccagtgcgcgacgaacagaaccaccgccatcgacgacaagaacacgaccacggccattctgttcgagcagatcgtacagcaacccgttgtcctcgaaacattttaccgtgattatttgtccgccaaacgacgcccgtccgccaaagttggagaacagcggttccacgacgttaacatcttcttgatagatgtcacaaagctcggaagtatcgtatttcataggcttaacattcagttgctgcgagaattttcagtatatcgcgctatgtgggctgttggcaaaatcatcaattgttaattgatatttgtcagttatgctgcccactggcttaggaatatccctaaaacaaacagcaggttagtcagtaacgctcccttgacagtacgttccagcattggtcgcatcgccaccgggtccatttcccgcatcacataacgggcttgcttcaccagtaatggtgccgccagcaggaacagccagccccacaggctatgcagcgaaaagagattaaacagcgccagacataccagagagcccatcagcaggcaggcatgataacgacgcgcgttcacttcacctaagcgcaccaccagcgtgtttttgccattttcgcggtcgctattgatatcacgcaggttattaatgttcagtactgccgttgccagcaggccacaggcggtcgccggaaggatcagtgccggaatcaatgtatgagcctgtaaataccagctccccatgacgctcaaccagccaaagaaaaccagtacggaaatatcacccagaccgatataaccataaggacgattgcccacggtgtaggtgatagcggcaatgatcgacaacccgccaagaatcaggaaaccgacaaaatcggccagcgtatggcatgccactgcaaccagtgccagcccggagagacagatgagcacgacggtaataatgagcgcccgtttcatctcttgctgggtaatgacccctttttgcatgccgcgtagcggcccaatgcggtcaggtttatcgctgccttttaccgcatcgccgtaatcattggcgaggttagaaaggatctgtaatagcccggcggtaattagtgccagcagggcgaccagcggatcgaagtgaccttgccaccatgccagcgccgtcccgacgataattgcagcaaaggcgagggggagggttttaggtcgtaaactttccagccacgcctgagttcggctaatttgttgttcagtcataatacgcgccaataaaaatggggcctttcagccccatcaaacaatgatgaaaatgattgaacgcgattataggataaaacggctcagatcttcatctgccaccaacgcatccagatgtttgctcacataatctgcgtcaatagtgatattttgaccgcttaaatcgctggcgtcgtaggaaatctcttccattaaacgctccagaacagtgtgtaaacgacgagcaccgatgttttcggtagattcgttcacctgccatgccgcttccgcgatgcgtttaataccggagtcggtaaactcgatatttacgccttcagtcgccatcagtgctttgtactgcacggtgatagaggcattcggctcggtcagaatacgctcgaagtcgctggtggtcagtgcctgcagttcaacgcggattggcagacgaccttgcagttccgggattaggtcagacggtttcgcaatctggaacgcgccagaagcgataaacagaatgtggtcagttttgaccatcccgtgtttggtggaaacggtgcaaccttctaccagcggcagcaggtcacgctgaacgccttcacgagaaacatccggaccggaagactcgccgcgcttacagattttgtcgatttcgtcgataaacacgatcccgtgctgctcaacagcgtcgatagcgtcttgcttcagctcttccgggttcaccagtttcgccgcttcttcttcaatcagcagcttcatggcgtctttgattttcagcttacgcgctttttgcttctggccgcccaggttctggaacatggactgcagctggctggtcatctcttccatgcctggaggagccataatttcaacgcccatcggtgctgcggcaagatcgatctcgatttctttgtcatcaagctggccttcacgcagttttttgcggaatgcctgacgagcagcggacggttcctgctgctgttcggtctgtccccagttgtttttagcaggtgggatcagcacgtcgagaatacgttcttctgccagttcttcagcgcgataacggtttttctcgatagcctggacgcgtaccattttcacggcggcatcggtcagatcgcgaataatagaatccacttccttaccgacgtagcccacttcggtgaatttggtcgcttcaactttgatgaacggcgcattcgccagcttagccagacgacgggcgatttcagttttaccgacaccggtcgggccgatcatcaggatatttttcggggtcacttcatggcgcagctcttcgttgagctgcatgcgacgccagcggttacgcagagcaatcgccacagaacgcttggcgttgtcctggccgatgatgtgcttatccagttcgctgacgatttcgcgtggggtcatttcagacatgggagatccttacgctttgtagcttaattcttcgatggtgtggaaatggttggtatagatgcaaatgtcgcctgcaatatccaacgccttttcagcaatttcacgggcgctaagttcagtgttttctaacagcgcgcgcgccgcagcctgggcgtaagggccgccggagccgatagcaataagatcgttttctggctgcaccacgtcaccgttaccggtgatgataagcgatgcagtttcatccgcgactgccagcagtgcttcaagtttgcgcagcatgcgatcggtacgccagtcttttgccagctcaacggcggctttaaccagatggccctgatgcatttccagtttacgttcaaacagttcgaacagcgtaaaagcatccgcagtaccgcccgcaaagcccgcgatgactttgtcgttgtacagacggcggacctttttcacgttgcctttcattacggtattgcccaacgtggcctgaccatcaccagcgatgaccacatggccgttacggcgtacgcttactatagttgtcacgagctgaccccttggttacgaatacagagtacaaaccccgtacaaaagtacggggcataatgcaattatagatgggggggattttgagggtttcaacccccggcggcgagccgaatgcagtttgtatgacccgccatcttcaaccgattgagggtgctgtctgcgttctctttgcctttcaccgggccaatgaccacacgattccagccattgttggtggtgattttcgagtcaaatccttcgaacgccagctgagcacgtaccgtctctgcctgttccgcgcctctgaacgaaccgcactgcaccatccagcggcgttcgtcttttttctccgccgtcggttttggcgcgtcagcggcacgagtaaccggcgcagcttgctgcggcttcgactgcgcggttgtgtgcgcaggggtttgcagcagatcctggtacggctgctgagtagaagccggtttagactggcgcggttgcgcctgtaccggcgcggcttgagacgtacgcgtctgctgctgccagctttgttcagtcgtacgcgactgctgagccaggcgttgctgttccgctaattgctgcgcctgacgttggcgctgtagcgtttgctgacgctgttccggcgtctgttcattccacggaacctcaaccagctgcgttggctgctggcgcatatcagcctgcatttgttcaagaagctgacgttgttctggtgtcagttgctccggcgttttcacttcaccaccagcagaaggttctgtgggcgcacgcacacccggctggcgactttccagctctttgatgtagcgccagcgttcttctggttttggtggtagtccgtttccggtcactttctggctttgcagcgtctcggactcttctttcttgtgatgcgtaatgaagtacagaccaccgataaaggtcacaagaacggcggcagcaatagcgaccatagcgggagaaaccgcaggcagatttcgttgctttttccgtgaggtgctcttttttcgccgcgaaggtgccggttggctgcggcgtacataatctcgttgtgccactatcgtttcgctgtatttattcgttcgtcagcccgccatgttacttaagcggcgggcctttgaccagtcacggcagtcttaaaggtttactttaaggtaacgcgcgtgttgatccccggatgataagttcgcagtccattaaacgagagccactgccaacgtgttgcccctgcatttgatcaagcaataacagcatagcttcccgaccgatttcgtaacgcggctgcgcgatggttgtcagcggcggatcacaaaattgcgtcaggtcgatgttatcaaaaccgattatggaaaggtcttccgggactttcagcccctggcgttttgcctgagaaagtgcgccgagcgccatcacatcgctatggcagaagacatcagtaggcggttgtggaagatcaagcagctgctgcatcgctttgcttccggcttcgaaggtgaagtcgccacgggcgatgtattgcggatcaaccataatgccgcagcgacgcagcgcctgaacatagccttgcaggcggtagtgacacagtggcatctcttcgggaccggctatacagccaatccgtttatgcccttgctcatataaataatttactgcatcaaatgcggcggtcagattgtcgatatgaacggtaggcagctccagttccggtgcaaattcgttcgccatcaccatcggcggcagattacgctgttcctcaatgctggcatcaaacggcagccttgagcccagcagcaacatgccatcaatttgcttggtgatgatcaaatcgataaaggttttttcctgctgattttgatgcgcacagtcgccaatcagcaccagatatccgtgatttgccgccgtaacttcgataccgcgaataatttcgctaaagaagggatcgcagatatccgggacaatcaccagaatggtgcgggattcattacgcttgacgttgcgccccataggttgcggtaaataacccacttcccgggccgctttttcaacccgattacgggtggcctgggagactttatcgggattcattaatgctcgggagacagtcgctgtagagacttttgccttgagggcaacgtctttcatggtcgcggcagtttcctgcttcttcgctttcacactcactcctcgcctggcacgtcaggcgtactacatccatgtttacttcacatcggcaacatttttagcagatagcgcgtgaaaacggttacagaattttcatgaaaagtgtgatgaatattgaatttttcgatccgcctcgcaacgtttgcgcattagccttcgatgggatcgacatccaacacccatttcaccttgcgggaatccggtattgtattaataagcgccagcgtaccactaatgatgtgttgcaagcgcacgcgggaagggtgctgcaacaagatctgccagcgccagcggccaccacgcttaggtgccagagccggaaccgggccgagaacccacagtttgtcgtctgcc

SEQ ID NO: 244 - DNA, 18624 bp, Escherichia coli
  source 1..18624: mol_type = genomic DNA
gtgcgcgagctggaaaatatttaccgccagcaatcgccagaaaaagctgaagcgtttatcgcctcgctctctgccagtcagcggcgtagcattgatgatatcgaacgcagcctgcaaaacgaccgtctggcacagcaggcagaggcactggaaaaccagggcaaatgggcgcaggcggcagcacttcagcggcaacgactggcgctggaccccggcagcgtatggattacttaccgactttcgcaggatctctggcaggccggacaacgcagccaggccgatacgttaatgcgcaatctggcgcagcagaagccgaacgacccggagcaggtttacgcttacgggctgtacctctctggtcatgaccaggacagagcggcgctggcgcatatcaacagcctgccgcgcgcgcagtggaacagcaatattcaggagctggttaatcgactgcaaagcgatcaggtgctggaaaccgctaatcgcctgcgagaaagcggcaaagaagctgaagcggaagcgatgctgcgccagcaaccaccttccacgcgtattgacctcacgctggctgactgggcgcaacaacgacgtgattacaccgccgcccgcgctgcatatcagaatgtcctgacgcgggagccagctaacgccgacgccattcttggtctgacggaagtggatattgctgccggtgacaaagcggcggcacgtagccagctggcgaaactgcccgctaccgataacgcctcgctgaacacacagcggcgcgtggcgctggcacaggcgcagcttggcgataccgcagcagcgcagcggacgtttaataagttgatcccgcaggcaaaatctcagccaccgtcgatggaaagcgcgatggtgctgcgtgatggtgcgaagtttgaagcgcaggcgggcgatccaaagcaggcgctggaaacctacaaagacgccatggtcgcatccggtgtgactacgacgcgtccgcaggataacgacacctttacccgactgacccgtaacgacgagaaagatgactggctgaaacgcggcgtgcgcagcgatgcggcggacctctatcgccagcaggatcttaacgtcaccctcgagcatgattactgggggtcgagcggcaccggtggttactccgatctgaaagcgcacactaccatgttgcaggtggatgcgccgtattctgacgggcggatgttctttcgcagtgatttcgtcaatatgaacgtcggcagtttctccactaatgccgatggcaaatgggatgacaactggggtacctgtacgttgcacgactgtagtggcaaccgcagccagtcggattccggtgccagcgtggcggttggctggcgcaacgacacctggagctgggatatcggcaccacgccgatgggcttcaacgtggtggatgtggtcggcggcatcagttacagcgatgatatcgggccgctgggttacaccgttaacgcccaccgtcggcccatctccagttctttgcttgcctttggcgggcaaaaagactccccgagcaataccgggaaaaaatggggtggcgtacgtgccgacggtgtggggctaagtctgagctacgataaaggtgaagcaaacggcgtctgggcatcgcttagtggcgaccagttaaccggtaaaaatgtcgaagataactggcgcgtgcgctggatgacgggctattactataaggtcattaaccagaacaatcgccgcgtcacaatcggcctgaacaacatgatctggcattacgacaaagacctgagtggctactcactcggtcagggcggttactacagtccgcaggaatacctgtcgtttgccataccggtgatgtggcgggagcgcacggaaaactggtcgtgggagctgggggcgtctggctcgtggtcgcattcacgcaccaaaaccatgccgcgttatccgctgatgaatctgatcccgaccgactggcaggaagaagctgcgcggcaatccaacgatggcggcagcagtcagggcttcggctacacggcgcgggcattacttgaacgacgtgttacttccaactggtttgttggcacggcaattgatatccagcaggcgaaagattacgcacccagccatttcctgctctacgtacgttattccgccgccggatggcagggtgacatggatttaccgccgcagccgctgataccttacgccgactggtaagttttcagatagcgcctctcttaatgccgctgcgatcgggtatactcgggcggcaatctgggatttccggggggagacaatttgcgcgtaagtcgctcgttaacaatcaagcagatggcaatggtggcagccgttgtcctggtgttcgtttttattttttgcaccgttttgctgttccatctggtccagcagaatcgctataacacggctacgcaactggaaagcattgctcgctctgtccgcgaacccttatcttcagctattttgaaaggcgatattcccgaagcggaagctattcttgccagcattaaaccggcaggcgtggtcagccgtgccgatgtagtgctgcctaaccagttccaggcgctgcgtaaaagttttattccagagcgtccggtgccggtaatggttactcgcctgtttgagctaccggttcaaatctcgctgggcgtctactcgctcgaacgtccggcaaatccgcagccaattgcctatctggtgctacaggcggattccttccgtatgtataagttcgtgatgagcaccctctcaacgttagtgaccatttacttacttttgtcgttaatattgacggtggcgattagctggtgcattaaccgcctgattttgcatccgttacgcaatattgctcgcgaacttaacgccatcccagcccaggagcttgttggtcaccaactggcattaccgcgtctgcatcaggacgatgaaatcggtatgttggtgcgcagttacaacctcaaccagcaattgctgcagcgccattatgaagaacagaacgaaaatgcgatgcgcttcccggtgtcggatttgccgaacaaagccttgctgatggagatgctggagcaggttgtcgcgcgtaaacaaaccaccgcgctgatgatcatcacctgtgaaaccctgcgtgatactgcgggcgtgctgaaagaggcgcaacgagaaattctgctgctgacgctggtggaaaaactcaaatcggtactgtcgccacgtatgatcctcgcgcagattagcggttatgactttgctgtcattgccaacggtgtacaggaaccgtggcacgcaatcaccttaggtcagcaagtgctcactatcatgagcgagcgcctgccgattgaacgtattcaactccgtccgcactgtagcattggcgtggcgatgttctacggcgatctcaccgccgaacagctttacagtcgcgctatttctgcggcatttaccgctcgccataaaggcaagaatcagattcagttctttgatccgcagcagatggaagccgcccagaagcggttgacggaagagagcgatatccttaatgcactggaaaatcatcagtttgctatttggttacagccacaggtcgagatgaccagcggaaaactggtcagtgcggaagtgttactgcgtatccagcaaccggatggcagttgggacctgccggatggcttaatcgatcgcattgagtgctgtgggctgatggttaccgtcggtcactgggtgctggaagagtcctgtcgattgcttgcagcctggcaagagcgcggcattatgctgcccttgtcggtaaacctctctgcgctgcaactgatgcacccaaatatggtggcggatatgctggaactgttaacccgctatcgcattcagccgggaacactgattctggaagtgacagaaagccgacgtattgacgaccctcatgctgcggtggcaatcctccgtccgctgcgcaatgccggagttcgggtggcgctggatgatttcggcatgggctacgcagggctgcgtcagctgcagcatatgaaatcgttgccaatcgacgtactgaaaatcgacaaaatgtttgttgaaggcttgccggaagatagcagcatgattgctgcaattatcatgctggcgcagagcctgaacttacaaatgattgccgaaggcgtggagactgaagcacaacgcgactggctggcaaaagcgggcgttggtattgcccagggcttcctttttgctcgcccactccctattgaaatcttcgaagagagttacctggaagaaaagtagctaccccaaactgattacaaaactttaaaaagtgctggtttgtgcgagccagctcaaactttttaacctttttgtttcaattatgatccaggtacatttctgtgatgttgtctgggtgttattttaaggccgcaggtaccccataaccttacaagacctgtggttttactaaaggacaccctatgaaaacctctctgtttaaaagcctttactttcaggtcctgacagcgatagccattggtattctccttggccatttctatcctgaaataggcgagcaaatgaaaccgcttggcgacggcttcgttaagctcattaagatgatcatcgctcctgtcatcttttgtaccgtcgtaacgggcattgcgggcatggaaagcatgaaggcggtcggtcgtaccggcgcagtcgcactgctttactttgaaattgtcagtaccatcgcgctgattattggtcttatcatcgttaacgtcgtgcagcctggtgccggaatgaacgtcgatccggcaacgcttgatgcgaaagcggtagcggtttacgccgatcaggcgaaagaccagggcattgtcgccttcattatggatgtcatcccggcgagcgtcattggcgcatttgccagcggtaacattctgcaggtgctgctgtttgccgtactgtttggttttgcgctccaccgtctgggcagcaaaggccaactgatttttaacgtcatcgaaagtttctcgcaggtcatcttcggcatcatcaatatgatcatgcgtctggcgcctattggtgcgttcggggcaatggcgtttaccatcggtaaatacggcgtcggcacactggtgcaactggggcagctgattatctgtttctacattacctgtatcctgtttgtggtgctggtattgggttcaatcgctaaagcgactggtttcagtatcttcaaatttatccgctacatccgtgaagaactgctgattgtactggggacttcatcttccgagtcggcgctgccgcgtatgctcgacaagatggagaaactcggctgccgtaaatcggtggtggggctggtcatcccgacaggctactcgtttaaccttgatggcacatcgatatacctgacaatggcggcggtgtttatcgcccaggccactaacagtcagatggatatcgtccaccaaatcacgctgttaatcgtgttgctgctttcttctaaaggggcggcaggggtaacgggtagtggctttatcgtgctggcggcgacgctctctgcggtgggccatttgccggtagcgggtctggcgctgatcctcggtatcgaccgctttatgtcagaagctcgtgcgctgactaacctggtcggtaacggcgtagcgaccattgtcgttgctaagtgggtgaaagaactggaccacaaaaaactggacgatgtgctgaataatcgtgcgccggatggcaaaacgcacgaattatcctcttaatctcatcacttatgcccgcactcccttccccgagtgcgggtgtttgcgcataattgacccctgtgcctgaacttaccacctgggtgagttcaggtttatttcacttcttccgtgacattttcatgttcttgcggtctaacacgaagtgtttttaacgtcatttagactgaccgacaacgggcagtttttttattaccaggatagttgatcaggggttcacatgcagggcacaaaaattcgacttttagcgggcggtttgctgatgatggccactgctggctatgtgcaggcagatgcgctccagcctgatccagcatggcaacaggggacgctttccaacggtttacagtggcaagtgctgaccaccccccagcgtcccagcgatcgtgttgaaattcgcctgctggttaataccggttcgctcgccgaaagtacacaacagagcggttacagtcacgccatccctcgtattgcgctaacgcaaagcggtggccttgacgcagcacaggcgcgttcattgtggcagcaggggatcgaccctaaacgcccgatgccgccggtaattgtctcgtatgacactacgctgtttaatctgagtttgcccaataaccgtaacgatttgctgaaagaggcgctctcttacctggcaaatgccactggcaaactgactatcacgccagaaaccatcaaccacgcgctgcaaagtcaggacatggtggcaacctggcctgccgatactaaagagggctggtggcgttatcgtctgaaaggatcaaccttgttaggtcacgatcctgccgatccgctgaaacaacccgttgaagcggaaaaaattaaagatttctatcagaaatggtacaccccggatgcaatgacgctactggtggtgggaaacgtggatgcgcgctcggttgtcgaccaaatcaacaaaacgtttggcgaactgaaaggcaaacgtgaaacgccagctccggtgccgacgctttctccgctgcgtgcggaagcggtgagtattatgactgacgcggtgcgtcaggaccggttatctatcatgtgggatacgccgtggcagccgattcgtgaatcagccgcactgctgcgctactggcgtgcggacctggcccgcgaggcgctgttctggcatgttcagcaagcgttaagcgccagtaacagcaaagacatcggtcttggatttgactgccgtgtgctgtatctgcgtgcgcagtgtgccatcaacatcgaatcaccaaacgacaagctgaacagcaaccttaatctggtggcgcgtgaactggcgaaggttcgcgataaaggtctgccggaagaagagttcaatgcgttagtggcgcaaaagaaactggagctgcagaaactgtttgccgcctatgcgcgggctgataccgatattctgatgggtcagcggatgcgttcgttgcaaaatcaggtcgtcgatatcgcgccggagcagtatcagaaactgcggcaggatttccttaacagcctgacggtggagatgttaaatcaggatctgcgtcagcagttgtcgaatgatatggcgttaatactgctgcagccgaaaggcgagccggaatttaacatgaaagcgttgcaggcggcctgggatcaaatcatggccccatctaccgccgctgcgaccacctctgtcgccacggatgacgtacatcctgaagtgacggatattccacctgcacagtaatgcctgatggtgatgagttagcacaatcatcaggtatttatggatgagctggatagaggggtaacactttatccagccttttgcatatgctgcttttacgctggcatcgcctcacgcgggataatcgcgccgcgatactgaataacggtacttgcggtcaggtgcccgcgtttcgccgcgttttccgcactgccgcccgttaaacgtaccgccagataaccggcactgaaagagtcgccagctgcggtggtatcgatcactttttctttcggcagtttcaccgccggaacatccactaacccttcgccagcaatggacaccaggcaagaatccgccccgcgtttcaccaccacttctttcacgcccgcgttatgggtgcgcgcaatgacgtcttccaccggctgttgaccccacagcgcgtcttcgtcgtccagcgtcaggaaggcgatatccgtgcattccagcatttgttggtacacctgctgtgtctcttctttgctggcccacaggcgcggacgatagttattgtcgaaaatcacttttccgccgttggcgcggcattcgcgcagcagggaaagcagcttttcgcggctggtcgggcttaagatcgccaggctaatcccgctcaggtagagataatcgaaattcgccagctcttcgcaaatcgccgcagactgctcgctctccagccagaatttggcagcggcttcgttacgccagtagtagaacgtacgttcaccggtgctgtcggtttcaatgtagtaaaggcccggcagacggttttccatccgttgggtcagggaagtatcaacgttctcgccgtgccaggcgtccagcatttgctggctaaaactgtccgttcccagcgccgttacgtaatggacggttaatgccgcaggatcgacctgacgggcgatatagacggaagtgttcagggtatcgccgccgaaaccgcgcttaacgtccgcgcctttctcggaaagctcaatcatgcattcgccaatcacggcaatctttttggacatagtcgtgaacctgatctgtaaaaaattagcgttagtttgcgctgtggtggtttgctggtcaaccatattaaaacagtgttccattatttttttgagccaggacgtattcctgaaagattccgttgtggagtgaggaaatttaccccggccaggcggtaaagttctgcccttacgcgccgataatctttgtcgagtccgggcagcatcacttttaaacacaggacatctttgatgataaggcaggttatccagcgaataagcaaccctgaagcaagcatcgagagcttgcaggaacggcgtttttggttgcagtgtgagcgtgcttacacctggcagccgatctatcaaacatgcgggcggttaatggccgtggagctattaacggtggtcgcgcatcccttgaacccttcgcaacgcctgccgccggatcgctattttactgaaatcaccgtcagccatcggatggaggttgtgaaagagcagattgatttgctggcgcaaaaagccgacttctttatagagcacggcctgctggcatcggtcaatattgatggccctacgctcatcgccctgcgtcagcaaccaaaaatcctgcgccagattgagcgtcttccctggctgcgtttcgaactggtggagcatatccgtctgccgaaagattcaacctttgcctcgatgtgtgaatttggcccgctgtggctggatgattttggtaccgggatggcaaatttctctgcactaagtgaagtgcgttatgactacatcaaaatcgcgcgagaactgtttgtgatgctgcgtcagtcgccggaaggacgcacactcttttctcagcttttacatctaatgaatcgctattgtcgcggggtgattgttgagggcgtagaaacgccggaagagtggcgtgatgttcagaactcgcccgcattcgccgcacaaggctggtttctttcacgcccggcaccgatagaaacgctgaatacggcggttctggcgctataagctgcctcattttccgcctggctggactatctttaggactggcacaggaagaatatgaggaagcgaacgatgagcaaggcaggcaaaataaccgctgcgatttcaggggctttcttgttgttgattgtcgtggcgatcattttgattgcaacttttgactggaatcgactcaaaccgaccatcaaccagaaagtctctgcggagttgaatcgtccgttcgctatccgtggcgatctgggcgtggtgtgggagcggcaaaagcaagaaacaggctggcgcagctgggtgccgtggccccatgtacacgcggaagacatcattcttggcaatccaccggatattcccgaagtcacgatggtgcatttgccacgcgtagaggcaacgctggccccgctggcgctgctgaccaaaacggtctggctgccgtggatcaagctcgaaaagcccgacgcgcgcctgattcgcctctccgaaaagaacaataactggacgtttaatctcgccaacgatgataacaaagacgcgaatgcaaagccgtcggcatggtcgtttcggctggataatattcttttcgatcaagggcggatcgccattgatgacaaagtaagcaaagcggatctggagatttttgttgatccgttaggcaagccgctgccgttcagcgaagttactggatcgaaaggtaaagcggataaagaaaaggtgggcgattacgtttttggcctgaaggcgcagggacgttataacggtgaaccgctcacgggtacgggaaaaataggcggtatgctggcgctgcgtggcgaagggacgccgtttccggtacaggctgatttccgctctggtaacacccgtgttgcttttgatggcgtcgtgaatgacccaatgaagatgggcggtgtcgatttacggcttaaattttctggcgattcactgggtgatctctatgaactgacgggcgttctgctgcccgataccccgccgtttgaaacggatggtcggctggtagcgaaaatcgacactgaaaaatcgtcggtctttgattatcgcggttttaatgggcgaattggcgatagcgatatccacggttctctggtctacaccaccggaaagccacgaccaaaactggaaggtgatgtcgagtcgcggcaattgcggctggcggacctgggaccgttaattggcgttgactccgggaaaggggcagaaaagtcgaaacggtctgaacagaagaagggcgaaaaaagcgttcagcctgcgggcaaagtgctgccttatgaccgcttcgaaaccgataaatgggacgttatggatgccgatgttcgcttcaaagggcggcgcattgagcatggcagtagcctgccgattagcgatctttctactcatatcatcctcaaaaatgctgacctgcgcctgcaaccgctgaaatttggcatggcgggcggcagcattgcggcgaatattcatctggaaggcgataaaaagccgatgcaggggcgggcagatattcaggctcgtcgactgaaactgaaagaactgatgcccgatgtggaactgatgcagaagacgctgggggaaatgaacggtgacgcggaactacgcggtagcggtaactcggtggcagcacttttaggcaacagtaacggcaacctgaaactgttgatgaatgacgggctggtgagccgcaacctgatggagattgttgggctgaatgtcggcaactacattgtcggtgcgatatttggtgacgatgaggtgcgggtgaactgcgcggcggcgaatctgaatattgccaacggcgtggcgcgcccgcagatttttgctttcgatactgagaacgcgttgattaatgttaccggcacggcaagttttgcttcggaacagctggatttgactattgatccggagagtaaagggattcggattatcacactgcgttcgccgctgtatgtgcgtgggacgtttaaaaatccgcaggctggggtgaaagccgggccgttgattgcccgtggtgctgttgctgcggcactggcaacgctggtaacaccggcggcggcgttactggcactgatctcaccttccgaaggggaggctaatcagtgtcggacgatattgtcgcagatgaagaagtgatgaggttggattgtgtttgctggtgagttcgggagcagcgtgttcccctcaccctaaccctctccccaaaggggcgaggggactgttttgtgcgtgttgaaacaacgagtaccgcttttccgttcactttctgggggagggctgttatgttcgcgatataacatctcgctccgcttttctccctctccctttcagggagagggctggggtgagggtggctgcccacacgatacttacaacgactgatgtcgcgtctcatgggtcagcagcagggcgattaacgtcaagccagccatcgccgccagatataaccccaccgcacctaacccgtagttagcctgcaaccaggctgcgatatatggtgcaacggaagccccgagaatcgacgctacgttgtaagagaacgatgctccggtgtaacgcacttctgtcgggaacagctctggtaacagcgcgcccatcggcccgaaggtcagtcccatcagacttaaccccagcagcaggaaggcaaaaaccagaatcgggttgccagaaccgagcagcgggttaaaggcgaacagcgcgaacaggatgatcagcgtggtgatgattaccatgcttttacggcgaccaaaggcatcagccagtaatccggcgactggcaccatcacgccaaaaccaataactgccatcatcagcatccacaacacttcgttacgcggcaggccaagcccaactggcgcggcggcggtactgaaggtcatagagtagaccgtcatgatgtaaaacagcgtataggttgccagcataatgaacgtacccagtacggttacgcgaacatgtttggtcagcagcgtacccagcgggatcttcacctgttttttcgctttagcgactttctcaaacaccggcgactcatgcagcgacacgcgaacatacaggccgataatgaccagcaccgccgagaagataaatggcacacgccagccccagctcataaactgctcgtcggtcagtagccaggaaagcagcaagaaagtgccgttggcaaagaagaagccaatcggtgcgcccagctgtgggaaggagccatacagtgcacgtttgcgcggtggggcgttttcagtcgccagcagcgccgcgccgccccattcaccgcctaagcccagaccctgaccaaatcgagccagcgccagcagcagcggggcgaaaataccaatcgtggcatagcccggcagcagaccaatcaccacggtcgaaatccccatcgttagcaacgaggcgaccagcgtcgctttacgcccaacgcgatcgccaaaatgaccaaaaacggcagagccaatggggcgcgcgacgaaggcgatggcgaaggtggcgagcgactgtagcgttgctgccgttggatcgccctgcgggaagaagatatgcggaaacacaataacggccgcagtggcgtaaatgtaaaagtcgaagaactcaatggccgtgccaatgagagaggcgacaaggactttattacgcgagttgattggcgtgtattcttgctcgtggtcgagtgttgtggctgttgcttgcataatcttttcttattttttggctaacgaatagccatattacgcacagcaaaagtgatatttcaatgtgtaacaaatcgcggaaatggtcaaaaaccaggcaaaaaggggataatgtttaggccagtgatttttcttctatgaaatgcttcacataattttataaatagtggataaaactggtttcaggttaaataaaagttaccaactggatttatatgctggggttatgagttggaatgaaattgtttgctcccaaatagatggctgaagaggctctggggaagagtttcaagaggttatgtgcgcattatagccggatgcgatgctggcgcatcttatccggcctacggggagccaggccgaataaaatcgtatgccggataaggcgtttacgccgcatccggcctattttaaggctgcgttttccctggcattcgcgggtcgtctttatattcggcggtggcaatccacgccgcgcaaaacagcgtcaaacgggcgaagaagtagaaaaatgccatcagccccagcacggaaccaaatgctgcgccagagggggatttcatcagcgatggcaaggtgtaggtcatcacgattttaatcacttcaaaaccaatagcagccagaaatgttccgcgaatcagggcttttttgcgcggacggtggcgcggcaaccgccagaagatccagaagaaaagcagatagttggcgaagatggaaatcgccaggccaatcaaccgccacgtcggtttcagccactcaatgctgttcaggtgcagggcgctaataatcatttgctgcgccgaaccggcaaccgaggtgatcgacagcgtcacaatcagcgcaattaacaaaccaatcagtgaaataaaatcacgcagatattttacccagaacttctcctgatcttgcggcgagcgttcccagacatcgcgcgactgggcacgaatcgcttcacgcaggttacccatccagttgatgccagaataaagcgccaccgccaggccgacaagccctacagtcgtacgctgctgaacggcggtgttgatggtgtttttcaacgtggcggctagcgtcggatcgctgatgttttgcagaattttgtcgaagatatcctgtagcaacatcggatgggaggccagcacaaagccccctgcggcaaacgacaccatcaaaatcgggatcatcgataaaaatgagaaataggtgatagccgcaccaaactggttacccagccgatcgttaaagcgttctgtcgcgcgaatcaggtgcgcaataaccggttggcgttggactttttcggcagtggtggtgacggtttccagcgcctggctaactttgccgcctttctcgctattatccaactgcttaatcggctcgtgctccagatcctgggtgggacgtttgatctcgttttcctgcgtcatccgctcttttgtccttctgtcgtggtcattcttaaaaagtatagtcggtcagtccaggtgctctttcattacgccagccagccactgcataaacaggtttacacgccgggaaagctcccgacgctgcgggtaaaccagcgaaagggagagcggctcggcacggtagcctggcaacacttcaataagccgcccggcacgcagggcttcgcgcacggcaatgcgcgggatctgaataatccccagaccggcaagaccggcggcgagatagttttcgctactgtttaccgtcaacatgccgccagacttaaaccactggacgccattaacgctggcaacctcaaaacctaacggatgtacacccaggtgcggtgtataacgcactattgcgtgtgaagtcagatcatcggggctttgcggataaccaaagcgcgtcagatagtgcggactggcacagttgaccatggtcagtttgccgaggggacgggcgataacgccatcttccggtaacgcgccagtgcgtatcacgcaatcaaaaccatcatgaagaatatctaccggacggtcatggctactcagttccagctcaattcccggatgcagatagagaaattccgacaggcgcggcagtaacaggcttttcgcgattcctggcgggatgtcgatgcgtaatttaccgctgatactggtggcatcctgttgaaacagaccgtccagttcgctgagattactcaacacatcttttgctcgttgataataggtcatgccttctggcgtgagtttgacccgtcgcgtggtgcgctggagaagctgggtgccaagttgatgttccagtgcctgtatctggcgcgaaacacttccttttggcaaagcaaagaaatccgccgcgcgggaaaaactttccagctccgcgactttgatgaacaactgcattgcgtgaattttatccatttctttgaccgattgttgttcacagcgaaacagtaacgcgcatatcgcattgtttattgttttttctaacatctaatgccgggtttcacaatgttgtcatgacgaatgtggcgatttctcagcaggaaaagggcggaatagctttctgagaaaggtgaatccccctaaacagagcgtatttttcagcgattccctttaaagtgaatagaggacgtgttggctatttgtgcttatttttgtctcattgccgtttgttatttttgcttgtggtcgcggagtttcatttttaattgcatgcgtactaaccaccaatataaggaaatcctcaaaattgttttaaatagtgccctcgacatgtaatttcaggcgtttagctgtaactatttatatcggtaactattttctacgcgtcatctctgtagaatggccaccgccaaatggcgaattcttattttttctcgcgggtaatacccttccactacttaagtctttttaacgtattcaggtggagattcagttatgcaaatagtcatgtttgacaggcagtcaatatttattcatggaatgaaaatcagtttacagcagcgtattccaggagtgagtattcagggggccagtcaggcagacgagttatggcaaaagctggaaagttaccctgaagccttagttatgctcgatggcgatcaggatggtgagttttgctactggttgctgcaaaaaaccgtggtgcagtttcctgaggttaaggtgttaatcacggcgacggattgcaataaacggtggttacaggaagttattcattttaatgtgctggccattgtgcctcgtgattcaaccgtcgagacatttgcgttggcggtaaatagtgcggcgatggggatgatgtttctgcctggagactggcggacgacgccggaaaaggacattaaagatctcaaatcgttaagcgcccgccagcgggagattttaaccatgttagcggcgggcgaatcaaataaggagatcggcagtgcgctgaatatcagtaccggaacggtaaaagcgcatctggaatccctgtatcgccgtctggaagtgaaaaatcgcacccaggcggcaatgatgttaaatatctcctcctgaagaggataattttacagccagcaggaagttagcggctggctgtaaaaatattatggttcgccgtacaaaccaattaaacggcgtaccacaccgttagtccagccaaacccatcctgcaacggatactcgccaccgccgccttcgcggggaacaccatcggcaatatggtatttctcgatcattttgtgctgttccagatagaactgattcaccgttttcagccagctgcgcgcgatttcatcacccagaaggtcatcgccatacattttaaatccctgaattgccatccattgtaacggtgcccagccattgggtttatcccactgttcaccggtttcgtactcgcttgccagaatcccgccaggtgtcagtaaccggctgcgtacggcgtttgccagacgatcggcctgttcatggttcgccatgccgacatagagcggcacaatggcggcagcggaaaacagcgccagttgttcgcgtcgccagtcgtaatcgcggtagatgccgttttcatcatcccagaggtaacggtttaccgcatcgcgacgggcactggccttctggcggaacagcgcttctgtctctttctcgcctttcagcgccgagatgttggcgatggcgctctccagtttaaacaggaaggcattcagatcgatggggatgaactgggtggtacgaatgctcgccagacgaccagtatcacgcagccaacgggaagagtaatcccaacctgaggccgctcccgcgcgtaaatcgcggtacacctcgttgggcgggcgaccagaatgtttcgcggtttcaacgtcctcaagccaggattcgtcacgcggcgtgtcgcgatcgtcccaataacggttgagcagcgatccgtccggcatccgcacaacatggcgataggcctgattagggatcaacgattctgcaccgtccatccagaaggcatattccattttaaggtggtcgagatagcggcgcgcaccgcgtacaccatcttcttcaaacaactccaccatcagcgcaaaaaccggtggttgcgatcggctcaaataataggtgcggttgccgttggggatgtgaccatagttttcgatcatccaggcgaagttatcggccatgcatttcagcaaatcttcccgaccactttccgccagccccagcatggtgaaataggaatcccaatagtaggtttcgctaaaacggccgcccgggacaatatatgactgcggtannnnnnnnnnagaccacggaatgtgatcctgtggttcgcgggttagcaccggccacagctggtcgatatgctctttcagggaattttgcgggtccgatacatactcgctggagtagacctccggcagccagaagtgattttcaacaaacttgcgcaagtcaaaatcacgatgacggcgcactttacggtagcggattaaaatatccagcgggtccattttgggtgcgcagtcgggaaaggttttactgtcggggaaaattttcgccgactgaacatgctcgaacagttcgagatagcgatcggcaggcgtcagcgcatcagaggcgggcagcccttcaatcatctcgggttccggttctgcctcgatcatctcatccagttttaattcatacgggtccagctcatagcagagatcgacttcgatcatcagttcgtctggattagggttttgaattttctgattgagcataaggatccaacctccgaaattcgtcgctaattatcgggcttttctttaagggtagtcattcgctccgcctggtgggcgacaaagcgtgcggtggatcacgtttattaacctgtcaaaaaatataacgcactaatatccatggaatttataaaaatacggatttcgtgttgtttttcattttcagaacattcaatcctgctctcgccgcaatcatgatatgccattcctgatctgggtaataggcacaggctatctt

SEQ ID NO: 245 - DNA, 18519 bp, Escherichia coli
  source 1..18519: mol_type = genomic DNA
tcagtagctgaacaggagggacagctgatagaaacagaagccactggagcacctcaaaaacaccatcatacactaaatcagtaagttggcagcatcacccacacgctcgacgccggtctgaaatacgcgccccatagtgacaggctttgggtggggagcgcaaaaatattaatttctccatcatggcgaaaattatctaaataaatagggcttaaatttattactacctgaaattcaatattttctttgtgtcttccattcttgacggaataagtgagtttaaattgaaccttttcattgtatagtgtgtcgttaccccgaaaagaagtcctctgaatatatgataagttatcaaggttgttaaatatcttttttgtggctgagttggtgtttaaagacgtgcgccactcttcatcacatattatggtactgagtgcatcaataaaatcctttaaaacttcttttacctgaggtgcaatattacgtacgggaaaatcatcaggaagagatatgtaattactgatgcttactggcgtaaccatatttgccccatatagtcataagtcatcggaacatcactatatagggcatttgagctgcaagaactatcaaaaatagctcattggtaaccctgttttgccgagtcaggcacatccagtagttgaataaatgcctcaagcggacgcgttttcgcaccacgacgccagaccagccaggttgttaaccaacgccattgctcagctaacggccacgcttcaacctggtgatgccccggcatactttccagcatagagcgtggaataagcgcaatgcctgctcctgcgaccacacaggccaacatcccgtgatacgactccatctcgtgaatagttcccggagcggcaccgtcagcatgaaaccagctctcgaagtggcgacgatacgaacaattggcgcggaaggcataaatgttgctgccgttaacctgactggcgcggattactggcgcatgaccttgtggcgtgacgatcatcagctcctcgcggtataccggtatcccgtcaatggcagtatggttaatgggcccatcaataaatgccgcattcagttttccctccagcactccttccagcatagtgccggaagggccggtggaaagtgaaaactgaattttgggataacgatggttgaattccgccagcgtggccggaatgcgcactgctgcggtgctttccagcgaaccaagagaaaataaaccttgcggctcatcgccagcgacaacgctccgcgcttcatccactaacgcgagaatttgttggctatagcgtaaaaagttatgcccggcaggagagagacgtaaacgctgattctcgcgaataaacagatctacccccagttctgtttccagctggcgtagacgggtagtgagattcgacggcacgcgatgcactattgctgctgcctgggttatgctgccagcttcggcaaccgcgttgaacatctccagttgggtcagatccataatattctcgattcgtgaataagtggcttaatattattcattttaaagcaagagtaaatctgcgtatcttcataccatgactcataaaggagataccccgatgaccattactccggcaactcatgcaatttcgataaatcctgccacgggtgaacaactttctgtgctgccgtgggctggcgctaacgatatcgaaaacgcacttcagctggcggcagcaggctttcgcgactggcgcgagacaaatatagattatcgtgctgaaaaactgcgtggtatcggtaaggctctgcgcgcccgtagcgaagaaatggcgcaaatgatcacccgtgaaatgggcaaaccaatcaatcaggcgcgcgctgaagtggcgaaatcggcgaatttgtgtgactggtatgcagaacatggtccggcaatgctgaaggcggaacctacgctggtggaaaatcagcaggcagttattgagtatcgaccgttggggacgattctggcgattatgccgtggaactttccgttatggcaggtgatgcgtggcgcggttcccatcattcttgcaggtaacggctacttacttaaacatgcgccgaatgtgatgggctgtgctcagctcattgcccaggtgtttaaagatgcgggaatcccgcaaggcgtatatggctggctgaatgccgacaacgacggtgtcagtcaaatgattaaagattcgcgcattgctgctgtcacggtgaccggaagtgttcgtgcgggagcggctattggcgcacaggctggagcggcactgaaaaaatgcgtactggaactgggcggttcggatccatttattgtgcttaacgatgccgatctggaactggcggttaaagcggcggtagccggacgttatcagaataccggacaggtttgtgcagcggcaaaacgctttattatcgaagagggaattgcttctgcatttaccgaacgttttgtggcagctgcggcagccttgaaaatgggcgatccccgtgatgaagagaacgctctcggaccaatggctcgttttgatttacgtgatgagctgcatcatcaggtggagaaaaccctggcgcagggtgcgcgtttgttactgggcggggaaaagatggctggggcaggtaactactatccgccaacggttctggcgaatgttaccccagaaatgaccgcgtttcgggaagaaatgtttggccctgttgcggcaatcaccgttgcgaaagatgcagaacatgcgctggaactggctaatgatagtgagttcggcctttcagcgaccatttttaccaccgacgaaacacaggccagacagatggcggcacgtctggaatgcggtggggtgtttatcaatggttattgtgccagcgacgcgcgagtggcctttggtggcgtgaaaaagagtggctttggtcgtgagctttcccatttcggcttacacgaattctgtaatatccagacggtgtggaaagaccggatctgacgcgacatattcagctctgatatactcgcaggtcttttcagacctgcggtccaggagtagaaagtggcagtcgccatggataatgcaattttagaaaacatcttgcggcaagtgcggccgctcattggtcagggtaaagtcgcggattatattccggcgctggctacagtagacggttcccgattggggattgctatctgtaccgttgacggacagctttttcaggccggagacgcgcaagaacgtttttccattcagtctatttccaaagtgctgagtctcgttgtcgccatgcgtcattactccgaagaggaaatctggcaacgcgtcggcaaagatccgtctggatcaccgttcaattctttagtgcaactggaaatggaacagggtattccgcgtaatccgttcattaatgccggtgcgctggtggtctgcgatatgttgcaagggcgactaagcgcaccacggcaacgtatgctggaagtcgtgcgcggcttaagcggtgtgtctgatatttcatacgatacggtggtagcgcgttccgaatttgaacattccgcgcgaaatgcggctatcgcctggctgatgaagtcgtttggcaatttccatcatgacgtgacaaccgttctgcaaaactactttcattactgcgctctgaaaatgagctgtgtagagctggcccggacgtttgtctttctggctaatcaggggaaagctattcatattgatgaacctgtggtgacgccaatgcaggcgcggcaaattaacgcgctgatggcgaccagtggtatgtaccagaacgcgggggagtttgcctggcgggtgggactaccggcgaaatctggcgttggtggcggtattgtggcgattgttccgcatgaaatggccatcgcagtctggagtccggaactggatgatgcaggtaactcgcttgcgggtatcgccgtccttgaacaattgacgaaacagttagggcgttcggtttattaatgcagtctctcgatccactcttcgcgcgtttatcccgttcaaaatttcgctctcgctttcgtctgggcatgaaagagcgtcagtattgcctggagaaaggcgcgccagtcatcgaacaacatgcggcggattttgtcgctaaacgtcttgctccggcattaccggctaatgacggtaagcaaacccccatgcgcgggcatccggtgtttatcgctcagcacgccaccgcgacctgctgtcgcggttgtctggctaagtggcataacattccgcagggtgtttcgttaagcgaagaacaacaacgttatatcgtggcggtaatctatcactggctggttgtacagatgaatcagccatgagaattgcggaaaacgataaaatagcattcccagggtacctttatttgccgccgctgttagcgaacatgctatcctttatgtgaatttacttattacgttgagataattgccacccgcaattgtatggacagataattaatgcatgtacaccccatttcaactttccgtttgttccaggaaggtcatctgctacgtaatagcatcgctatttttgcgctaaccacgctgtttattttattggtgcagagttacggctggttcacgaactttctcttttctggccgctgaatggcgtaatggcgggggtgtttgcccgctatgtctggcttaatcgactgcattactatgcgatcagttatgtggcgatgctggtttatgatgccataaccaccgaatggggactggtttcactggttatcaatttctccaatatgatgtttattgttaccgtcgccttactggtcgtgcgggataagcgtctggggaaaaataagtatgagccagtaagtgccttacggctatttaattactgtctgattgccgcattattatgcgctattgtcggggcgattggttcggtcagtattgatagtctggatttctggcctttgcttgcggactggttcagtgagcaattctcaacgggcgtgttgatcgtgccttgtatgctgacgttggctattcctggagtgctgccgcgctttaaagcagaacagataatgcccgccatcgcgcttattgtgtcggttattgcctcggtagtcattggcggagcggggagtctggcgttcccgctgcctgcattaatctggtgtgcagtgcgctatacgccgcaggtaacatgtctgttgacctttgtcaccggtgcggtggaaatcgtactggtggcaaattcggtgattgatatctcggtcggttcgccgttctccattccggaaatgttctccgcacgtctcggtattgccacgatggcgatatgcccaattatggtttcttttagcgtggcagcgatcaattcgctaatgaagcaagttgcgctgcgagccgactttgattttctgactcaggtttactcacggtccggtctttatgaggcgctgaaaagtccatcgctgaaacagacacaacatctgacggtcatgctgcttgatattgactatttcaaaagcattaacgataactatggacatgaatgtggcgataaagtgttaagcgtgtttgcccggcatattcagaagattgtcggtgataaggggctggtggcgcgcatgggcggcgaagaatttgctgttgcagtgccgtctgtgaatcctgtcgatggtctgctaatggcggaaaaaatccgtaaaggcgttgaactgcaaccattcacctggcaacaaaaaacgctttatctcacggtaagtattggcgtcggtagtggtcgcgcatcgtaccgaacgctgaccgatgattttaataaattgatggtcgaagccgatacgtgtctgtatcgctcgaagaaagatgggcgcaaccgtaccagcactatgcgttacggtgaggaagttgtctgacatctttattcattccgcgcgatttgaatgcaatgtgttctaccactttatgatccaggaaaaggcgtatttcctcgattaaaccatgatccgcgccacacttttctcataaaactgctcattaatcatcaggagttgatcaaaataggggttcggcgtattaaagtttgctaacctgtcgtaccaattcaaacaggttgtatgactaatcagaagggaacccattgtgaaaacactaaatcgtcgcgattttcccggtgcacagtatccagaacgtatcattcagtttggtgaaggtaacttcctgcgcgcctttgttgactggcaaatcgatctcctgaatgagcacaccgatctgaattctggtgtggtcgttgttcgtccgattgaaacttcattcccaccgtcactgagcacgcaggatggtctgtataccaccattatccgtggcctgaatgagaagggggaagcggtcagcgacgcgcgtctgattcgctcggttaatcgtgaaatcagcgtctacagtgaatacgatgaattcctgaaactggctcacaacccggaaatgcgctttgttttctctaataccaccgaagcgggtatcagctaccatgcgggcgataaattcgatgacgcgccagcggtaagttatccggcaaaactgacccgtctgctgttcgaacgttttagccatttcaacggtgcgctggataaaggttggatcatcatcccgtgtgagttgatcgactacaatggcgacgcgttgcgtgaactggtgctgcgctatgcgcaagagtgggcactgccagaagcatttattcaatggctggatcaggctaacagcttctgttctacgctggtggaccgtatcgttaccggttatccgcgcgatgaagtggctaaactggaagaagagctgggttatcacgatggttttctcgacaccgctgaacacttttacctgtttgtgattcagggaccgaaatccttagcgactgaactgcgtctggacaaatatccgctcaacgtgctgattgttgacgatattaaaccgtacaaagaacgcaaagtggcaatcctcaacggtgcgcacaccgcgctggtgccggtggcgttccaggcagggctggataccgtaggtgaagcgatgaacgatgctgaaatttgcgcattcgttgaaaaagctatctacgaagaaattattccggtactggatttgcctcgtgatgaactggaatctttcgccagtgcagtcaccgggcgtttccgtaacccgtacattaagcatcagctgctgtctatcgcgctcaacggtatgaccaagttccgcactcgcatcctgccgcagctgctggcagggcagaaggcaaaaggcacacttccggcgcgtcttactttcgcattagcggcattgattgccttctatcgtggtgagcgtaacggagaaacatatccggtacaggacgatgcacactggctggaacgttatcagcaactctggagccagcatcgtgaccgtgttatcggtacccaggaactggtagcgattgtgttggcagaaaaagaccactgggagcaggacctgacgcaagtgcctggtctggtcgagcaggttgctaatgacctggatgcgattcttgaaaaagggatgcgcgaagctgtacgtccgttgtgctaataacaccgttacttctgaacccggtttcgaccgggtttcttatttcactatattagttacaacatcctatgtgcctttatcattaacaggtgccacatgcagcgcctgttaatgttgtaagcttgtaggtaatttgtaagtagcgtcttgagaatgtgatcataatcacgtttaatagggcgactttttcacgcctgaagataaccatgattgttcgtccacaacaacactggctgcgccgtatttttgtctggcacggctcagtattatccaagatatcatcgcgcttactactcaattttctcttttctatcgctgttattttcatgctgccctggtacacgcatctgggcatcaaattcaccctcgcaccgttcagcattctcggtgtcgccatcgccatttttcttggttttcgtaataatgccgggtacgcccgttacgttgaagcgcgaaaactttgggggcagttgatgattgcctcacggtcgttactgcgcgaggtaaaaacgacattgccggattcggcaagtgtaagggagtttgcccggttgcaaatcgccttcgcccactgtttacgcatgacattacgcaaacagccacaggcggaagtgctggctcattatctcaagactgaagatcttcagcctgtactggcttcgaactctccagctaaccgtatcttgttaataatgggggagtggttggcggttcagcgccgcaatgggcagctttcagatatcctgtttattagcctcaacgatcggcttaatgatatttcagcggtcctggcaggatgcgagcgcattgcctatacgccaattccctttgcctacaccctgattttgcatcgtaccgtttatctgttttgtatcatgctgccgttcgcgctggtcgtggacctgcattacatgacgccttttatctctgtgctgatttcctacacttttatttcgctggattgtctggcggaagaactggaagatccgttcggtactgaaaacaatgatttaccgctggatgccatctgcaacgctattgaaattgacctgttacagatgaacgatgaagccgaaattccagcaaaaattcttcccgatcgtcattaccagctgacgtgatatttactccgtacggcgggcaacaataaaaagacgcggaaatgccagcagtatctgtccgttctcttgcagtggatactgctcttccagcatctgatggtagcgcttaagaaaaagctgctgttcgctctcggtcagatcctgtaaccacggacgtaatccagtggcggtcacccaatcgataatcgcctggtgtgacggcatctggtgatagtaggtggttcgccagatatcgacctcacatccggcttcgctcaaaatatcgtagtaagcatgaacgccagccaacggctcacgcccacgatccgggtagttttgttcccaggcaacttcgcgcatgagcacatgggtcggctccagccagttatctggcatctgtactgccagcacgccctgcggattaagtaaagaaaccagatgaggaaacaattcgtagtggtcgggcagccattgcagtgaggcattagcaaaaatcagatcgagtgcctgtaccggttgccagttgcggatgtctgcttccacgaactggcagtctggcaaagcactgcgcgcttcagcaatcatcgccggagacgagtcgatgcccgttatcctggcagcaggccaacgttgttgtagaagggcggtgctgttacctgggccacagccaagatcggcaacatattcgacattctccagcggcactctggcaagcagctccaccgccggacgcgatcgttcagcggcaaagtgcagatataaagaggggttccagtcagacatttttttactcccgtcagcgcgttaccccaattgtagataaaattgataaattcgcctcacggcatcaacccattgaacagacgttttttacgcggcccggtcattaaagattccagtttcgcgacacaggttttgtagtggggcgtggttttatggaatgccactgcgtcttcatctttataggcttcgtagatataaaagcgcgaattcacttccgggtcctgtaagacatcgaagcgcaaattgccttcttcctgtaccgagcccaggtggttctggcgaaaaacttcgataaactcgtcaaccttgtcttcatgaacgttaatttcaaccagtgtgacgtgcataattcttctccttaaatccgcagttactgtttttcactcagatagagttcatatgcccgatcagccgtttcgttatggtgaaccaccgcctgtacggctttcatcatcgccaccggatggtcagactggaaaatattacgccccatatccacaccagaagcgccctgatcgatagcctgccagcacatttccagcgcctcgcgctccggtaattttttaccgccagcaataacaatgggtaccggacatccggcaacaatccgttcaaaacctttttcgacataataggttttgataatttgcgcccccatttcagcggcgattcgagtcgcgagcgagaaataacgctgatcgcgcaccatatctttgcccacgccagtcacggccatggtcggcattcccactttcattccggcatcgaccagctgaataatatttttgatcgactgatgttcatattcgctgccgatataaacctgcgccgccaccgcgcaactgttcaggcgcacggcatcatccatcgataacgccacggcttcattacttaattccgccagaatagagttcgcacctgacgcccgcagtaccaccggcttattggtcgccgggggaactacgctgcgcaaaatgccgcgcgtacacattaatacatcggcatgttcaaacagcggggcgatatttatatcaatgcgttcaagtccggtagtcggtccctgaaaataaccatggtcaaaagccagcatcacggttttacccgttttcggattaaatatccgcgataagcgtgactgcattccccaatccagcgcaccgcaacctttcagggtaaaagggatattttgttgcggttgatcggtacgaaaatctttaccatctttaatatcgtctaaatctgccataacttactccggttaagtaatgcacatcagaaatcgtatttgccgatattctctttgttgaatatcacgcgctccggtaacagtacgatgccattaccatccgcttcgtagtcatagccctgaacgctgtttggcgagacttccacctgacctactccctggatatccagcttgtcgcccgttttcattgatccttttttcaataatgcatccgcgacatacactgaaattttgccttgctgaaccacatcccacaggccaaattctttcaccgtgccgcgctctacatacgggcgcatcacatttggcgtactgaatccgacaatcgctactttgtcatttttcaggttttctgcggcttgtgcggcagcgggcagggcgttggcatcgggggcgataatggcgtcgagatcgctatacgcttttaatattccttctgctgtttgtaacgatttagtggcatcgttatagccaaactgcgtagtgacaatttcccagcctggatgctctttggcgattttcgctttcgcttctttcacccactggttttggtccgtaacggtggggcttgagtagaaaaacgcgactttggctttgtctttattcacctgacgcgccgccatatccaccaacatacctcccaactgggcgggcgttccctgattaatgtagtaagagcggcactccggtttagtatcagagtcccaggtcagcactctcacaccacgttgcatggcgcgtttcagtgccggacacaagccatcaggcgaaaccgcagaaacgataatggcgttataaccttgattgacgaagttattaatcaactgtacctgaccagaaacactgggttctgtcggcccgtcgtaggtcacatcaacgcccagctctttacccgcttgttgtgcgccgttgccaccgctggtaaaaaatcccacgccaaccagtttgggaataaatgcaatacgctctgcggcctgcacattcatagagattgcggcaatgccaagagcgctaagtaaggcgattttcttaaagcgatgaagtgtcatgaagatatcctttatggcaatgggttattggcccgacgcgccagccactctttaatttgctggcgatgcaggctaacggaacgacctacgacaacgacgataagtagcgcaccggaaagggcgctggacacctgatttggcactcctgccatttgcaaaccttgttgcaaatatcccactaataaaaccgcaatggcggtgccgataatggaaccggaaccaccataaatattggcaccgccaagcaccacggcggtgatggcgggcatcagaaacgacgcaccgagatcggaacgtgctgaaccaaaatacgacaccagcagcacagcggcgaccgcagacgccagccccgtcatggcatagagcgcacataaggtgcggttaactggaatcgcgctataaagcgccacgcgcgggctttgcccaatcaaaaacacattacgtccggcatgggttttatgcagccagagccagaaaacgaggagacatatcaggaagataatcagcggaacggggagtcccagcacatccaggttagcgaaatctgtaaacgccatcgggaatccaccaataccttcgtaccccgtcgctccggccatcccggaaagcagtagggcgcttccggcaaacagatacagcgtgccaagcgtaatcaccagcgggttaactttggtatagataattaatccggcgttgatcagcccgcacaatgcgccgagcagtaaggtcaggagaatcgccagcggcatcggcacaccactttgaaacagtacgcccaatgcaatggcgcagaggccgatggtcgaaccaaacgaaatatcgatcccgccactgacaatcaccatcgtcagcggtagggcgacaatgccaatgcagataaagtcactggtgctgaacagcaacatattgagatctaacattcgcgggttaattgcaccaaatgcgacaatctcaataacgagcagtgcggcaagagccagttcccaaccgtagcgaatacgcattatgcggcctcccgttttttacctgacgaagcgggtttaacggatggcggtggcgtcataaagcgggcatatttttgccgccgtagattacgttccagcgcacaacgcaggcgtccatcaaacaccagcaccgccagcagcacgaggcccgcgataaaatcgttccaccatgccggaatgcgcaacagcaccagtacgctatcgatctgcgtcaggaaccatgcgccgagtaccgcaccgatgatcgcaccggaaccgccgagcaaactaatgccgcccagcacgcaggctgcaattgctttcatctccagcccggtaccggtctggttggggataaaaccaatctgcgaagcaaacacaattcccgccagtgccgccatgcagccgttcaacgaaaatgccacaatgcgaatggcttccgtacgaacacccagttgacgagcgccctgtaaattatcgcccgtggcataaaaactgcgtccaaacgccgtctttgccagcagccaggccataaatgccaccagaattatcgtcaaccaaccaatcgcggaaacgccaaacagcagcggtgcggagagctgtttcagttcggcgggtaacccttcaatccatttaccgccagtccacagcaacatgatgcctctgtacaaccctaacgtgccaagggtggcaacaatggcagggatttttagccacgcgaccaggacaccgttgaaaaatcccgcgagcaaaccaagcagtaaagtcgcgacacaagcaacaggtagtgaataccccgcgttcagtaacatccccaacagcactgcgcacattccggtaatcgaacccactgaaacatcaatattgcgcgtaagcattaccagcgtcgcgcccattgccagcaggatcaggatttgcgcgctgctataaaccatggtcagcgtttgcacacttaaatactggcggtcgagaaaaccgggtaatgcaaacagcagcaccaccgccagcagtgccgtgatttcacggttgttctgaataaacttcagcatgatgcctcctgacgctgactatcgccgaaggcaacgcgcataatagtctcgacattaatatcgcgcccggtcagtgcagagtgggtaatttcgccctgatgcatcacatacacacgatctgtcatcagttcgatctcttccagatcagaggagataagcagcacagccacattctgtgcggcgatgctgcgcaacagctggtagatatcattacgtgccgagacatccacgccgcgcgtcggctcatcgacaatcaatacttgcggcgaagcttccaggcatttggcaatgaggattttttgctggttgccaccggataatgtccgtgcagcttgttccggttggttaaatttaatattcagcgcccgacgataacgttccagggtggcattatctttcgcggttttcgcccagaatccacgaaggttatgagtaagggcgcagacgttccaggccagcgaagcatcgagattcagtccggatgactggcgatcttccggcagataaaccagaccgcgcagtaaacgttctccagtggataatttattgatctctttaccattcagcataatgcgtccgccacgcaaagtacgcagaccatagagcgtctcggccagttctgtgcgtccggctcccaccagcccagccaggcccagaatttctccggcattgagcgtcaggctgacattcctgaaaccttcgccggtcagattttccagtgtcagcaccggcgttccggcagcatgttgtgggcggttaccaggtaactccagccataatttttggctggcagagagcgatttttcccgtaccgctggggtgatggcctgaataatgtcgtcggtagacagttcgctggttttgccgcttaaggcgatggttccgtcgcgcatcacgctaattcgatcggcaatctggcgaatttccggcagcttatgcgagataaaaacaatacccacgccagtagcaagcagctcttgcaagcgactaaacaagcgttcggtttccgcaggggtaagcgaggcggtaggttcatcgaggatcagaatccgcgagtcgcgcatcagcccgcggaggatttccaccatttggcgatcggcgacatccagcgatcctgccagactatgcagatcaaactggcagcccagcgccgccagcaagttcttcattttttgcatggagagctgtttttttgccatcccaaacaggatgttttcttttatcgacaggcttgggaaaagcagcggttcctggggaacgagataaatgcccagctgatgagcatgaactggcgttaatctggcgtagttgttgcccccaatctccagcgtaccgctatcagcaggggtaataccggcaataatcttcattaacgtcgatttaccggcaccattgccgccgagcagggcgtggacctccccctgatgcaacgtaaaatcgatgcctttcaggacattgacccctgaatactgtttataaaccgagcgggcgcaaagtagcggtaacgcgcgggtatcactcgtttgcatatttcccccgttcagttttgcaggtgagttttgaacaaatgtatttctgcttttaatttgttcataaccttaggtggacattgcacatatttccgacgaatagatcacaatttatgctattttgattttcacggttgcgtttgttcatgctcgtagagtcaaactgtggctgccatcacagatataaatgcgcaagaactgaacaattgcattaaagatttaaatatgttcaaagtgaagaatgaattatgacaatcaacgattcggcaatttcagaacagggaatgtgtgaagaagaacaggtcgcgcggatcgcgtggttttactatcacgacgggctgacccagagcgagatcagcgatcgtctcggcctgacccgtttgaaagtgtcgcgcttgctggagaaagggcatcagtccggcattattcgcgtacagattaattctcgctttgaaggctgtctggaatatgaaactcaattacgtcgtcagttttcgctgcaacatgtccgggtgatccctgggcttgcggatgctgatgtcggcgggcgactggggataggcgcggcgcatatgttgatgagtttacttcaaccacaacagatgctggcgattggttttggcgaggcaaccatgaatacgctgcaacgcttaagtggttttatttcgtcacagcaaattcgcctggtcacgctctccggtggcgtcggttcttatatgacgggtatcgggcagcttaacgcggcgtgcagtgtgaatattattccggctccgttgcgggcatcctccgctgacattgcccgtacgctaaaaaatgaaaattgcgtcaaagatgttctgttagccgcgcaagcagccgatgtggcgattgtcggcattggggccgtcagtcaacaggacgacgcgacgatcattcgctccggttatatcagccagggcgaacagttaatgattggtcgaaaaggggcggttggcgacattttaggctacttttttgatgcaaaaggtgacgttgtcacggatattaaaatacataacgaactgattggcttacctttaagctcgctgaagaccatacccgtccgggttggcgtggcagggggagaaaataaagccgaagcaattgccgctgcaatgaaaggcggttatatcaacgcactggttaccgatcaggacacagcagcggcgattttacgtagttaaatttgcatgaccttattaccgggaatgatggagaacgtatagaggaacagacagaacgcataagccgaggataatctaatggctcgactctttaccccttcagaatcaaagtattacctgatggcgctggatgcaggtaccggaagtattcgggctgtgatattcgacctggaaggcaatcaaatagcagtgggacaggcggagtggcggcacctggcagtaccggacgttcctggttctatggaatttgatctcaacaaaaactggcaactggcgtgtgagtgtatgcgccaggcgctgcacaacgccggcatagccccggagtatatcgctgccgtttcggcatgttcgatgcgtgaaggcattgttttatataataatgaaagagccccgatctgggcctgcgccaatgtggatgccagagcggcacgcgaagttagcgaacttaaagaactgcacaacaatacctttgaaaacgaagtttatcgcgcgaccggacaaacactggctttaagtgccatccccagattactttggctggcgcaccatcgttccgatatttaccgtcaggcatcaaccatcaccatgatcagcgactggctggcctatatgctcagcggcgaactggcggtggatccctctaacgctggcaccacgggacttcttgatctaaccacccgtgactggaaacctgcattgctggatatggctggcctacgtgccgatattctttctcctgtcaaagaaaccggcacattgctgggcgtggtaagttcacaagcggcggaactctgcggtctgaaggcgggcactccggtggtcgttggaggaggcgacgtgcagcttggttgccttgggttaggcgttgtgcgtccggcacaaaccgcggttcttggcggcacattctggcagcaagttgtaaatttagccgcgccggtgacagacccagaaatgaacgtgcgcgttaatcctcatgttattcctggcatggtacaagctgaatctataagcttttttaccggactcaccatgcgctggttccgcgatgctttctgtgccgaagaaaaactgattgccgaacgtttaggcatcgacatctatacgctgctggaagagatggccagtcgggtgccgcctgggtcgtggggcgtaatgccgatcttctccgacagaatgcgctttaaaacctggtatcacgctgcgccttcctttattaacttgtccattgacccggataaatgtaacaaagcgacattgttccgtgcgctggaagaaaatgcggcgattgtatcagcgtgtaacttgcagcaaattgctgatttctcgaatattcatccttcatcgttagtctttgcaggcggaggttcaaaagggaaattatggagtcaaattctcgctgatgtctcgggattacccgtcaatattccggtggtcaaagaagccactgcattaggatgtgccattgcagctggcgtcggtgccggaattttttcatcaatggcagaaaccggagaacgcctggttcgctgggaacggacgcacacaccagacccggaaaagcatgaactttatcaggattcacgcgataagtggcaggcagtttatcaggatcagctggggctggttgatcatggactgacgacgtcgttatggaaagcgcctgggttatagtttcattgacagccacatcatgatgaccgtggctgttagtttttgagtatagttattcttatttcccttcttttagagctggcttgttaaaagccagcttgcagattcatcgttccatcaccagtactatattcaagggaaaattgctatttttcttaaagcattaagcacaacccttattttatagcgaatattcctaaagacactaatggatgcaaaaggggtttaataaacttcgatttttagcaattagtgctattctttgttaaatatgatgatgataattttcctattgaaagaaacagttttcttattaagcaacaataactcatag

SEQ ID NO: 246 - DNA, 18504 bp, Escherichia coli
  source 1..18504: mol_type = genomic DNA
tatctcctattgtgtggcagaccttgaagatgcagtagagaaaagaatatttaccgttgagcagctttatcatcatttgcacgaagcgtggggccagcatgagaaaggttcgctcttttcgctggtggttgaaaatgcctgggaaaaatcacgctcaaatagtttaagccgcagtacggaagatcagttttttatgtatttacgggtaaacaccctaaataaactggtaccctacgcggcacaacgatttattgataatctgcctgcgattttcgccggaacgtttaatcatgcattattggaagatgccagcgaatgcagcgatcttcttaagctatataaaaatgtcgctgtaaaacatgtgtttagccatccagatgtcgagcagcttgaattgcagggctatcgggtcattagcggattattagagatttatcgtcctttattaagcctgtcgttatcagactttactgaactggtagaaaaagaacgggtgaaacgtttccctattgaatcgcgcttattccacaaactctcgacgcgccatcggctggcctatgtcgaggctgtcagtaaattaccgtcagattctcctgagtttccgctatgggaatattattaccgttgccgcctgttgcaggattatatcagcggtatgaccgacctctatgcgtgggatgaataccgacgtctgatggccgtagaacaataaccaggcttttgtaaagacgaacaataaatttttaccttttgcagaaactttagttcggaacttcgcgctataaaacgaatctgaagaacacagcaattttgcgttatctgttaatcgagactgaaatacatgaaaaaaaccacattagcactgagtgcactggctctgagtttaggtttggcgttatctccgctctctgcaacggcggctgagacttcttcagcaacgacagcccagcagatgccaagccttgcaccgatgctcgaaaaggtgatgccttcagtggtcagcattaacgtagaaggtagcacaaccgttaatacgccgcgtatgccgcgtaatttccagcagttcttcggtgatgattctccgttctgccaggaaggttcaccgttccagagctctccgttctgccaggggggccagggcggtaatggcggcggccagcaacagaaattcatggcgctgggttccggcgtcatcattgatgccgataaaggctatgtcgtcaccaacaaccacgttgttgataacgcgacggtgattaaagtccagctgagcgatggtcgtaagttcgacgcgaagatggttggcaaagatccgcgctctgatatcgcgctgattcagatccagaacccgaaaaacctgaccgcaattaagatggcggattctgatgcactgcgcgtgggtgattacaccgtagcgattggtaacccgtttggcctgggagagacggtaacttccgggattgtctctgcgctggggcgtagcggcctgaatgccgaaaactacgaaaacttcatccagaccgatgcagcgatcaaccgtggtaactccggtggtgcgctggttaacctgaacggcgaactgatcggtatcaacaccgcgatcctcgcaccggacggcggcaacatcggtatcggttttgctatcccgagcaacatggtgaaaaacctgacctcgcagatggtggaatacggccaggtgaaacgcggtgagctgggtattatggggactgagctgaattccgaactggcgaaagcgatgaaagttgacgcccagcgcggtgctttcgtaagccaggttctgcctaattcctccgctgcaaaagcgggcattaaagcgggtgatgtgatcacctcactgaacggtaagccaatcagcagctttgccgcactgcgtgctcaggtgggtactatgccggtgggcagcaaactgaccctgggcttgctgcgcgacggtaagcaggtcaacgtgaatctggaactgcagcagagcagccagaatcaggttgattccagctccatcttcaacggcattgaaggtgctgagatgagcaacaaaggcaaagatcagggcgtggtagtgaacaacgtgaaaacgggcactccggctgcgcagatcggcctgaagaaaggtgatgtgattattggcgcgaaccagcaggcagtgaaaaacatcgctgaactgcgtaaagttctcgacagcaaaccgtctgtgctggcactgaacattcagcgcggcgacagctccatctacctgttaatgcagtaatctccctcaaccccttcctgaaaacgggaaggggttctccttacaatctgtgaacttcaccacaactccatacatcttcatcatcctttaggcatttgcacaatgccgtacgttacgtacttccttatgctaagccgtgcataacggaggacttatggctggctggcatcttgataccaaaatggcgcaggatatcgtggcacgtaccatgcgcatcatcgataccaatatcaacgtaatggatgcccgtgggcgaattatcggcagcggcgatcgtgagcgtattggtgaattgcacgaaggtgcattgctggtactttcacagggacgagtcgtcgatatcgatgacgcggtggcacgtcatctgcacggtgtgcggcaagggattaatctaccgttacggctggaaggtgaaattgtcggcgtaattggcctgacaggtgaaccagagaatctgcgtaaatatggcgaactggtctgcatgacggctgaaatgatgctggaacagtcgcggttgatgcacttgttggctcaggatagccgtttgcgggaggaactggtgatgaacctgattcaggcagaggagaatactcccgcacttactgaatgggcgcaacggctggggatcgatctcaatcaaccgcgagtggtggctattgttgaggtcgacagcggtcagcttggtgtggacagcgcaatggcggagttacaacaactgcaaaacgcgctgactacgcccgagcgtaataatctggtggcgattgtctcgctaaccgaaatggtggtgttgaaaccggcgttgaactcttttgggcgctgggatgcagaagatcatcgtaagcgagttgaacaactgattacccgcatgaaagagtacggccagctgcgttttcgcgtttcactgggcaactattttaccggtcctggcagtattgcccgatcctatcgtacggcgaaaacgacgatggtggtgggtaaacagcggatgccagaaagtcgctgctatttttatcaggatctgatgttacctgtgttactcgacagtttgcgtggcgactggcaggccaacgaactggcgcgaccgctggcgcggctgaaagcgatggacaataacggcttgctgcgacgaacgctggcggcgtggtttcgtcacaatgtgcaaccgctggcaacgtcaaaggcgttgtttattcatcgtaatactctggagtatcggcttaatcgtatatcggaactgaccgggcttgatttgggtaattttgatgacaggttgctgctgtatgtggcgttgcagctggatgaagagcggtaggttatgcgttaaggtcgaggcggcgctggctcattcccctcagcccgaagggtagaggggaatgtccgagttaaccgtcagttcggcattatttacgcgttagtttttccagatcggcttcaatctcgctgatcttattggttacgactgactccaggtgacgtaagtcgtcgaggatcttacgcttaagatcaacttcgctgcggtcacgctggcagatttgatcaagctcatcaatgatataccgtagattcgggctgatttcctggacttctttataaccctgacccacaccatcagcgacgaccgttttacgctgacgcggatatttaaacttaacgctcttggcgaaaaactcgcctttgtctttctggaaatagattttcagaatatcgttgttggcttcctgccggaggctgtaacgatcaatttcttcaggattggtaatacccagacttttcagattgtcgtacatagcgttacctcaaaatgagtcagtaaattgtgcttattttagcatttggcctggcccgcccggctcgactgtgatcgcagaaagcctttttcttccagacttctatcatggcgtaaaaatcaaaaaattacctgctttattgtggcgatattccatgggatggattaacacatttatcttcgttttgcgaattacatgacagtccgaaacaagatgaaaaagtatttaaaaaaggggggaagaagaatgagtaggacgaattattctgagccagaaagcatacgggcagcatcatgctgcccgtatatgtactcttaatcgatggtacgcagcagttcgttaatgccgactttgccgcgagttttcgcgtcaactttcttaacgataaccgcacagtagaggctgtatttgccatctttcgacggcagattacctgaaacaaccacagaccccgccggaacgcgaccgtagtggatttcgccggtttcacggtcgtaaatacgggtgctctgaccaatgtatacgcccatagagatgacggaaccttcttcgacaatcaccccttcaaccacttcggagcgtgcgccaatgaagcagttatcttcaataatggtcgggttagcctgcagcggctccagcacgccgccgatgcccacgccaccggaaaggtggacgtttttaccaatctgcgcacaagaaccgacggtcgcccaggtatcaaccatcgtgccttcatcaacatatgcgccgatgttgacgtaagacggcatcagcacggtgttacgggcaataaatgcaccctgacgtaccgccgctggtggcacaacgcggaagccttctttctgaaaacgcgcttcgtcgtagtcggcgaatttcatcggcactttatcgaagtagcggctttctgccccttcgatcacctgattatcattaatacggaaagagagcagcaccgcttttttcaaccactgatgcgtcacccactgaccgtcaattttttccgctacacgcagtgcgccggaatccagcagggcgatcacctgatttaccgcttcgcgggttacggtgtctgcattggctggcgtgatctcggcacggcgttcaaaagcggtttcaataatgttctgtaactgctgcattgttaaactcttttcatatcagtaaacacatcaccctttatcgtttggattgagggcctctgtcaaccgctgatgcacttcctgctgcaactcgttattaagtgcacgccggtcagcggtggcaattatgaataaatcttctactcgctcgccaatggttgtaattcgggcaccatgaagcgaaattcccagatcggcaaaaattttcccgactctcgccagcagtcctggctggtcgagcgcgataagctcaaggaacgatttgcggtcggtatgggtcggcaaaaacgttacttcggtttcaacagtaaaatggcgtaatttggcgggttggcgacggggctgcggtggctgccagctactttgcgtcagtacttgctccagaccaaaccgaataacctcatgacgatctgcggacagcgggctgccatcgggttccagcacgataaaggtatccatcgccataccgtcgcgagtggtgaaaatttgtgcgtcgtgaacacttaaattgcggcggtctaattcggcacagacggcggcaaacagataggggcggtccgggctccagataaaaatctcggtgcctccacgcgtagcctgcgggctaagcaataccagcggtttgcttaaatcatgctgtaataaatggcgggcatgccaggccagttgatttgggctatggcggacaaaatagttagcacgacagcgtgaccaaatttggtgcagcgcctcttcgtcgatgttatccatgcgcagtagtgccagtgcctggagttggtgatggcgaacccgttcgcgcatatccggcgtgttttgcattccgcgtcgtagctgcttttcggtggcaaaatagagttcgcgcaacagactttgcttccagctattccacagcgtttcgttggtggcgcaaatgtcagccactgtcaggcataccagatagcgcagacgattttccgtttgaacttcttcggcaaactgcttgatgacttcagggtcctgaatatcgcggcgttgtgctgtcaccgacatcagcaagtgctggcgaaccagccaggcaaccagctgtgtttcgcgtgagttcagcccgtggagttctgcaaaatgcactacatcctgagcaccgagaatggagtggtcgccgccgcgtcctttggcgatatcgtgaaacagcgcggcgatgaaaatcagctcagttgacggcaggcgcggccagacgtccacacacaacggatggcgctggcgcgtttcttcactggcaaaactctccagtttcagcatcacgcggatagtatgttcatccaccgtgtaggcgtggaacagatcaaactgcatctgcccgacgatatgcgaccattgcggcatatacgcgccgagcacgctatggcgatgcattggcaatagcccgcgccgcaccgctccggggtgacgcagaatgctcaaaaacagttttcgtgcttccggaatattacacagcggttgttgcagatggcgacgggcatggcgtaactggcgcagcgtggtggagtaaatgccggtgatcgcactgttgcgcaccatggtgtagaacatacgcaagatggcttccggctggcgcataaatagtgtttcatcacgcaggtcgattagcgtaccgcgtagctgaaactcatcgtcgattggacgtggtttttcgtcggcgggaagggcgaggatggcttcatcgaacagttgcagcagcatctggttgagttcactgacgcggcgtgtaacgcggaagtaatccttcatcatccgctcgaccggttcgttgccttcaccactgtaattcagacgctgagcgacgctaagttggcgatcgaataacagacgattatcgtaacggctgacgaccagatgcagggcaaagcgaatacgccacagtatatgcagacattcgtttaattccgcccgctccgctgaggttaagaagccaaacccgaccatttcatccagcgatgttgcgccaaaatgacggcgggccacccattgcagagtgtgaatatcgcgcaagccgccagggctacttttgatgtctggttcaaggttgtagctggtgccatggtaacgctgatggcgctggttctgttcttcaactttcgccgcgtagaacttgtcggaaggccagaatccttcgctaaaaatatgtttttgcagttcgaggaagagcgcaacatcgccaattaataagcgggattcgattaaattggtggcgacggttaaatccgataacccttccagcatgcactcttcaagcgtgcgcacactatgaccgacttccagctttacatcccagagcagcgttaacagctcgcccactttttgcgcctgatcgtccgggagctttttacggcttaaaatcagtaaatcgatgtcagaaagtggatgcagctcgccacgaccgtagccaccgacggcgaccaatgccaggtcggcaatctggctgaatcccgcttcaatccataatcgttgcaggagctggtcgataaactcggtgcgcgcctcaatcaactgttctgcagagatcccattgtcaaaggcatcacccagccaacgctggaaagtatcgatatgggcttttatcccaccgacggttaattcatcacggggccagacgcatggattttgcggttgaccgggcagggtggggagagcggtgtttgcgtactgttctggaagggtattcattgtgcgccacccataaaattaaattatcgcattaaaaaagccggcattcgccggcttcatcttattcgtcgtgcgagattatcgccgggatggtgtcatccttgcgtagcgtcaaaatttcgcagccgttatcagtcaccacaatagtatgctcatattgtgcagacaagctgcgatctttggtttttaccgtccagccatctttcatggtgcggatctcttttttacccgcgttgaccattggctcaatggtgaacgtcatccccggtttcagcacgacgttggtttcacgggagtcatagtgcagcacctgcggttcttcatggaagccgcgaccaataccgtgtccacaatattcacgaacgacggagaagccttctgcttcgacaaacttctgaatcgccgcaccgatttcgcgcaggttaatgcctggtttgaccatgcgcagcgccaggtacaggctttcttgcgtgatgcggcacagacgttcgcccatgatggtcggcttaccgacgataaacattttcgaggtatcgccgtggaaaccatctttgattacggtgacatcaatgttaacgatatcgccatctttcagcagcttagcatcgtccgggataccgtggcacaccacttcattaatagagatgcaaacggatttcggatagccgtgatagccgaggcaggcagaaaccgcgtgttgttcattaacaatgtaatcattacagatgcgatccagctcgccggtgctgacgcccggtttaacatacggttcgatcatctccagcacttcggcagccagtcggccagcgacgcgcattttttcgatatcttctggggtcttgattgagatagccattaattctgtccatcagcgtcggtgataccgacaatatatatgtaagtgccgtcaatggtatcacacccgggcaaattgagaatcattctgaatttcgccaaacgtgccactgaaggttttctataatagaaaattcgacatnnnnnnnnnnatctgatgctgtacacagcgccaacaattattggtgtccatgacgtatttgtggtataaagcgcgccggacttccgatccatttcgtatacacagactggacggaagcgacaatctcactttgtgtaacaacacacacgtatcggcacatattccggggtgccctttggggtcggtaatatgggatacgtggaggcataaccccaacttttatatagaggttttaatcatggcaactgtttccatgcgcgacatgctcaaggctggtgttcacttcggtcaccagacccgttactggaacccgaaaatgaagccgttcatcttcggtgcgcgtaacaaagttcacatcatcaaccttgagaaaactgtaccgatgttcaacgaagctctggctgaactgaacaagattgcttctcgcaaaggtaaaatccttttcgttggtactaaacgcgctgcaagcgaagcggtgaaagacgctgctctgagctgcgaccagttcttcgtgaaccatcgctggctgggcggtatgctgactaactggaaaaccgttcgtcagtccatcaaacgtctgaaagacctggaaactcagtctcaggacggtactttcgaaaagctgaccaagaaagaagcgctgatgcgcactcgtgagctggagaaactggaaaacagcctgggcggtatcaaagacatgggcggtctgccggacgctctgtttgtaatcgatgctgaccacgaacacattgctatcaaagaagcaaacaacctgggtattccggtatttgctatcgttgataccaactctgatccggacggtgttgacttcgttatcccgggtaacgacgacgcaatccgtgctgtgaccctgtacctgggcgctgttgctgcaaccgtacgtgaaggccgttctcaggatctggcttcccaggcggaagaaagcttcgtagaagctgagtaataaggcttgataactcccccaaaatagttcgagttgcagaaaggcggcaagctcgagaattcccgggagcttacatcagtaagtgaccgggatgagcgagcgaagataacgcatctgcggcgcgaaatatgaagggggagagcccttatagaccaggtagtacacgtttggttagggggcctgcatatggccccctttttcacttttatatctgtgcggtttaatgccgggcagatcaaatctccgaggattttagaatggctgaaattaccgcatccctggtaaaagagctgcgtgagcgtactggcgcaggcatgatggattgcaaaaaagcactgactgaagctaacggcgacatcgagctggcaatcgaaaacatgcgtaagtccggtgctattaaagcagcgaaaaaagcaggcaacgttgctgctgacggcgtgatcaaaaccaaaatcgacggcaactacggcatcattctggaagttaactgccagactgacttcgttgcaaaagacgctggtttccaggcgttcgcagacaaagttctggacgcagctgttgctggcaaaatcactgacgttgaagttctgaaagcacagttcgaagaagaacgtgttgcgctggtagcgaaaattggtgaaaacatcaacattcgccgcgttgctgcgctggaaggcgacgttctgggttcttatcagcacggtgcgcgtatcggcgttctggttgctgctaaaggcgctgacgaagagctggttaaacacatcgctatgcacgttgctgcaagcaagccagaattcatcaaaccagaagacgtatccgctgaagtggtagaaaaagaataccaggtacagctggatatcgcgatgcagtctggtaagccgaaagaaatcgcagagaaaatggttgaaggccgcatgaagaaattcaccggcgaagtttctctgaccggtcagccgttcgttatggaaccaagcaaaactgttggtcagctgctgaaagagcataacgctgaagtgactggcttcatccgcttcgaagtgggtgaaggcatcgagaaagttgagactgactttgcagcagaagttgctgcgatgtccaagcagtcttaattatcaaaaaggagccgcctgagggcggcttctttttgtgcccatcttgtaaattcagctaacccttgtggggctgcgctgaaaagcgacgtacaatgtcgctagtattaattcatttcaatcgttgacagtctcaggaaagaaacatggctaccaatgcaaaacccgtctataaacgcattctgcttaagttgagtggcgaagctctgcagggcactgaaggcttcggtattgatgcaagcatactggatcgtatggctcaggaaatcaaagaactggttgaactgggtattcaggttggtgtggtgattggtgggggtaacctgttccgtggcgctggtctggcgaaagcgggtatgaaccgcgttgtgggcgaccacatggggatgctggcgaccgtaatgaacggcctggcaatgcgtgatgcactgcaccgcgcctatgtgaacgctcgtctgatgtccgctattccattgaatggcgtgtgcgacagctacagctgggcagaagctatcagcctgttgcgcaacaaccgtgtggtgatcctctccgccggtacaggtaacccgttctttaccaccgactcagcagcttgcctgcgtggtatcgaaattgaagccgatgtggtgctgaaagcaaccaaagttgacggcgtgtttactgctgatccggcgaaagatccaactgcaaccatgtacgagcaactgacttacagcgaagtgctggaaaaagagctgaaagtcatggacctggcggccttcacgctggctcgtgaccataaattaccgattcgtgttttcaacatgaacaaaccgggtgcgctgcgccgtgtggtaatgggtgaaaaagaagggactttaatcacggaataattcccgtgatggataaataagggtaagattccgcgtaagtatcgcgggggatcttacccgtaatatgtttaatcagggctatacttagcacacttccactgtgtgtgactgtctggtctgactgagacaagttttcaaggattcgtaacgtgattagcgatatcagaaaagatgctgaagtacgcatggacaaatgcgtagaagcgttcaaaacccaaatcagcaaaatacgcacgggtcgtgcttctcccagcctgctggatggcattgtcgtggaatattacggcacgccgacgccgctgcgtcagctggcaagcgtaacggtagaagattcccgtactctgaaaatcaacgtgtttgatcgttcaatgtctccggccgttgaaaaagcgattatggcgtccgatcttggcctgaacccgaactctgcgggtagcgacatccgtgttccgctgccgccgctgacggaagaacgtcgtaaagatctgaccaaaatcgttcgtggtgaagcagaacaagcgcgtgttgcagtacgtaacgtgcgtcgtgacgcgaacgacaaagtgaaagcactgttgaaagataaagagatcagcgaagacgacgatcgccgttctcaggacgatgtacagaaactgactgatgctgcaatcaagaaaattgaagcggcgctggcagacaaagaagcagaactgatgcagttctgatttcttgaacgacaaaaacgccgctcagtagatccttgcggatcggctggcggcgttttgctttttattctgtctcaactctggatgtttcatgaagcaactcaccattctgggctcgaccggctcgattggttgcagcacgctggacgtggtgcgccataatcccgaacacttccgcgtagttgcgctggtggcaggcaaaaatgtcactcgcatggtagaacagtgcctggaattctctccccgctatgccgtaatggacgatgaagcgagtgcgaaacttcttaaaacgatgctacagcaacagggtagctgcaccgaagtcttaagtgggcaacaagccgcttgcgatatggcagcgcttgaggatgttgatcaggtgatggcagccattgttggcgctgctgggctgttacctacgcttgctgcgatccgcgcgggtaaaaccattttgctggccaataaagaatcactggttacctgcggacgtctgtttatggacgccgtaaagcagagcaaagcgcaattgttaccagtcgatagcgaacataacgccatttttcagagtttaccgcaacctatccagcataatctgggatacgctgaccttgagcaaaatggcgtggtgtccattttacttaccgggtctggtggccctttccgtgagacgccattgcgcgatttggcaacaatgacgcccgatcaagcctgccgtcatccgaactggtcgatgggacgtaaaatttctgtcgattcggctaccatgatgaacaaaggtctggaatacattgaagcgcgttggctgtttaacgccagcgccagccagatggaggtgctgattcacccgcagtcagtgattcactcaatggtgcgctatcaggacggcagtgttctggcgcagctgggggaaccggatatgcgtacgccaattgcccacaccatggcatggccgaatcgcgtgaactctggcgtgaagccgctcgatttttgcaaactaagtgcgttgacatttgccgcaccggattatgatcgttatccatgcctgaaactggcgatggaggcgttcgaacaaggccaggcagcgactacagcattgaatgccgcaaacgaaatcaccgttgctgcttttcttgcgcaacaaatccgctttacggatatcgctgcgttgaatttatccgtactggaaaaaatggatatgcgcgaaccacaatgtgtggacgatgtgttatctgttgatgcgaacgcgcgtgaagtcgccagaaaagaggtgatgcgtctcgcaagctgaggataatccggctacagagagtcgcgctatttgttagcgtagggcttcagtgatatagtctgcgccatctgatcgtaagtagttggctttataaggtcaggtatgccgtggttttacacggcttttttttgtataggcttcagtattcctgagtaccgtaaaccctgtcagggaataaaaaacgcgtgatgttgtctgctactcaaccacttagcgaaaaattgccagcgcatggctgccgtcatgttgcgatcattatggacggcaatggtcgctgggcaaaaaagcaagggaagattcgtgcctttgggcataaagccggggcaaaatccgtccgccgggctgtctcttttgcggccaacaacggtattgaggcgttaacgctgtatgcctttagtagtgaaaactggaaccgaccagcgcaggaagtcagtgcgttaatggaactgtttgtgtgggcgctcgatagcgaagtaaaaagtctgcaccgacataacgtgcgtctgcgtattattggcgataccagtcgctttaactcgcgtttgcaagaacgtattcgtaaatctgaagcgctaacagccgggaataccggtctgacgctgaatattgcggcgaactacggtggacgttgggatatagtccagggagtcaggcaactggctgaaaaggtgcagcaaggaaacctgcaaccagatcagatagatgaagagatgctaaaccagcatgtctgtatgcatgaactggcccctgtagatttagtaattaggactgggggggagcatcgcattagtaactttttgctttggcaaattgcctatgccgaactttactttacagatgttctctggcccgatttcgatgaacaagactttgaaggggcgttaaatgcctttgctaatcgagagcgtcgtttcggcggcaccgagcccggtgatgaaacagcctgatgggggtcgcttttgctgaagtatcgcctgatatctgcttttgtgttaatacccgtcgtcatcgcggcgttgtttctgttgccgccggtggggttcgccattgtaacgctggtggtctgcatgctggcagcgtgggaatggggacagcttagcggttttaccactcgttcgcagcgagtatggttggcggtgttatgcgggttattgttggcgctgatgctttttctgttgccggaatatcaccgaaatattcatcaaccgctggttgaaatctcactttgggcttcgctgggttggtggattgtcgcgctattgctggtgctgttttacccaggttccgcagcaatctggcgtaactctaaaacattgcgccttatttttggcgtgctaaccattgttcccttcttctggggcatgctggcgttacgggcctggcactatgacgagaatcattacagtggcgcaatatggctgctctatgtcatgatcctggtatggggcgctgactccggagcatatatgtttggcaaattgtttggtaaacataagctggcaccgaaggtttctccgggtaaaacctggcaaggctttatcggtggactcgctactgcagcggtaatctcatggggttatggcatgtgggcgaatctcgacgtcgctcccgtcaccttactcatttgctctattgtcgcagcgttagcctcagtgctcggcgatctgaccgagagtatgtttaagcgtgaagcaggaattaaggacagcggtcatttaattccaggacacggtggtattttagatcgtattgatagcctgacggctgcggtaccggtctttgcttgcttgttgttactggtattcaggacgctttaacggaaggtaatatgctgagttttctctgggatttggcttcgttcatcgttgcactgggtgtacttatcaccgtgcatgaatttggtcatttctgggttgcccggcgttgtggtgttcgcgttgagcgtttctcaatagggtttggtaaggcgctctggcggcgaactgataagctcggcaccgaatatgttatcgccctgatcccgttgggcggttatgtcaaaatgctggatgagcgcgcagaaccggtcgttccggaactccgccaccatgccttcaataataaatctgtcggccaacgagcggcgattattgccgcaggtccggttgcaaacttcatttttgctatctttgcctactggctggtttttattattggtgtgcctggcgtacgtccggtggttggcgaaatagcagccaattcgatagctgcggaagcacaaattgcaccaggtacggaactaaaagccgtagatggtatcgaaacgcctgattgggatgccgtgcgtttgcagttggtcgataaaattggcgatgaaagcaccaccattacagtagcgccatttggcagcgaccaacggcgggatgtaaagctcgatttacgtcactgggcgtttgagcctgataaagaagatccggtatcttcgctggggattcgtcctcgtgggccgcaaattgaacctgtactggaaaatgtgcagccaaactcggcggcaagcaaggcaggtttgcaagcaggcgacaggatcgttaaagtcgatggtcagcccttaacgcagtgggtgacctttgtgatgcttgtccgggataacccgggtaaatccttagcgttagaaatcgaaaggcagggaagtcccttgtctttgacattaatcccggagagtaaaccgggtaatggtaaagcgattggttttgtcggtattgagccgaaagtcattcctttgccagatgtacgccagtatgggccgttcaacgccatcgtcgaagccacggacaaaacgtggcagctgatgaagctgacggtcagtatgctgggaaaattgatcaccggtgatgtgaaactgaacaacctcagtgggccgatctctatcgccaagggggctgggatgacagcggaactcggggtagtttattacctgccgtttcttgcgcttattagcgtgaacttagggataattaacctgtttccgttgcccgtacttgacggggggcatctgctgttccttgcgatcgaaaagatcaagggcggaccggtatccgagcgggttcaagacttttgttatcgcattggctcgattctgctggtgctgttaatggggcttgcacttttcaatgatttctctcggttatgagagttagttaggaagaacgcataataacgatggcgatgaaaaagttgctcatagcgtcgctgctgtttagcagcgccaccgtatacggtgctgaagggttcgtagtgaaagatattcatttcgaaggccttcagcgtgtcgccgttggtgcggccctcctcagtatgccggtgcgcacaggcgacacggttaatgatgaagatatcagtaataccattcgcgctctgtttgctaccggcaactttgaggatgttcgcgtccttcgtgatggtgatacccttctggttcaggtaaaagaacgtccgaccattgccagcattactttctccggtaacaaatcggtgaaagatgacatgctgaagcaaaacctcgaggcttctggtgtgcgtgtgggcgaatccctcgatcgcaccaccattgccgatatcgagaaaggtctggaagacttctactacagcgtcggtaaatatagcgccagcgtaaaagctgtcgtgaccccgctgccgcgcaaccgtgttgacctaaaactggtgttccaggaaggtgtgtcagctgaaatccagcaaattaacattgttggtaaccatgctttcaccaccgacgaactgatctctcatttccaactgcgtgacgaagtgccgtggtggaacgtggttggcgatcgtaaataccagaaacagaaactggcgggcgaccttgaaaccctgcgcagctactatctggatcgcggttatgcccgtttcaacatcgactctacccaggtcagtctgacgccagataaaaaaggtatttacgtcacggtgaacatcaccgaaggcgatcagtacaagctttctggcgttgaagtgagcggcaaccttgccgggcactccgctgaaattgagcagctgactaagatcgagccgggtgagctgtataacggcaccaaagtgaccaagatggaagatgacatcaaaaagcttctcggtcgctatggttatgcctatccgcgcgtacagtcgatgcctgaaattaacgatgccgacaaaaccgttaaattacgcgtgaacgttgatgcgggtaaccgtttctacgtgcgtaagatccgttttgaaggtaacgatacctcgaaagatgccgtcctgcgtcgcgaaatgcgtcagatggaaggtgcatggctgggaagcgatctggtcgatcagggtaaggagcgtctgaatcgtctgggcttctttgaaactgtcgataccgatacccaacgtgttccgggtagcccggaccaggtagatgtcgtctacaaggtaaaagagcgcaacaccggtagcttcaactttggtattggttacggtactgaaagtggcgtgagcttccaggctggtgtgcagcaggataactggttaggtacaggttatgctgttggtatcaacgggaccaaaaacgattaccagacctatccgcctttgtgcatccaaccgccattgtggaagagggcgcgtcgattggcgcgaacgcacacattggtcc

SEQ ID NO: 247 - DNA, 18015 bp, Escherichia coli
  source 1..18015: mol_type = genomic DNA
cagtatgggggaagcgaaatcctggtgtctgcgggaaattcccaaactttttagcggaaaataatatttgttattattaataaaaaggggcgaaatgtcgccccaattctaagattaatttgaaccaaacttaggatcgtttccgtaacgattgctgccagaattgccttctaaacaggcaaatacaaacagaactaaccagccaatgatcggtaccagatagagaagcgcccacgcacctgaacggtcagtatcgtgcagacgacgaacacacagagcaatgaccggaatgattgttgctgccaggtaaatgagagaaaggaatggaaactctaaacctaaaatcaattgaatgacattgataatagcgccgacgatggcgttaatcagagtaaacatccagtactctttacgacgtgcgcgaccagagaaaccaacataattttttaatacggctaaataccactgcataaaaacatccctttaattaaaagtgacgaaagtctattccgggtattgtgtaaatgctattcgtatctttctttttcggatgttataaaggttttgatatttaagataaatacatggttgttttttataggtaatttatataacgacattgaaatattttaaataaacattagtaaattattcattcatcaacatgatgataaaagccggatgagtcagacatccggcgagcagatttgttttaaggttccagtttcggatctggtccaaagcggttttcgcctggcgtacccgcctggcagttaaagacgatgataataagccagccgataaacgggattaagaacaacagtgcccaccacgccgagcggtcggtgtcgtgcaggcggcggaactgaactgcccaccacggtaaaaacaccagaataccgtagattgtcgtcaggatgccttcgccaccagcgcgttgccagcctaacattttatccagcagccccagcacgaacgtaaagatgatgttgaccagaataaacatccagtactctttgcgccgcgcacgaccccggaaaccgacataattttttagtactttcagataccagtccatttttgcctcaattttgctcaatcacttgtttttaaagcagcaaattaagaatagacgtgaatgaaatggcagtaaatattcgttcaaggaattaataaagtgctgtgaaggcgcgctaagactgatgacaagcgcaaaatcgccagatgcgctacgcttatctggcctgcgcggtcattgcaacatattgaatataaatgttttgtaggtttgataaggcgttcacgccgcatccgacatgaacaacatgcacttagctaattatcagaggcacctcgtaaggtgcctttttttaaccgaagcgaacatctcgtccatgcggttcatcgagatcctgccacggaccaattgaaataatccccgtagggttgatggtcttatggctgcggaagtaatgattacggatgtgatcgaaattgacagtttcggcgatccccggcatctggtagatatcgcgcaggaagccatacagattcaggtaattgctgatgcggtgcttatcacacttgaagtgggtcacatacactggatcaaaacgcaccagcgtagtccacaggcgaatatcggcttcggttagctggttgccggtcaggtaacgatgctggcctaaaatctgctccagtcgcgccagcgattcaaacactttcgccaccgcctcgtcgtaggcttgctggctggtggcaaaaccagctttatacacgccgttgttaacggtgtcataaatccagccgttaagttcgtcaattttcgtttgcagggctggtgggtagtaatcacccgcttttgcgcccagcgcatcaaacgcggtattgaacatgcggatgatttctgctgattcgttgctgacgatggtgtggttctttttgtcccacagcacgggaacagtaactcgtccgctgtagtgtggatcggcgtggagataaagctgatacagaaattcatgttgatagagcgtatctccggttgctcccggaaaactgtcatcaaaggtccagccgttttccagcatcagcgggttcactacggaaacggaaataaacggttccagtcctttgagtttgcgcatgatcagcgtgcggtgcgcccacgggcaggcgagtgaaacatagagatgataacgatctttctctgcgataaaaccgcctgtgccagtggggccaggtgcgccatcggcagtgagccagttacgaaatgcggaagctgaacgttgaaatttaccgccggtagatttggtatcgtaccaggtgtcatgccagacgccgtcaatcagttgacccatttttctctcctccaatagcaaaaacgaggagcttcctcctcgttttttatcgttaagtatagcgcgtgcttaccactttttattcagcaggcggtcgatgctatacgcgcccggaccggtaattgccagcagcaggaatccgccagaaattgtcaggtttttcatgaacatcagcgagttgacgccttcagcaaagttgctgtgaaataaaaatgccgtcagcagcgtaaagcccgcagtaaacagggctgtggtgcgagtcaggaaaccgaacaggattgccagaccaccaccgaactcaagcagaatcaccagcggcagcataaaacccgggacacccattgcttccatatattgttgggtacccgcgtagccagtaatttttccccagcctgcggtaataaacagaatcggcattaaaatgcgcgctaccagtacaccaacatcttctaattttttcatcatactctccactgcgccactcaggctgctgattgtttttttgtgcaagggcgcggtattagcgtcgttgctgtcgatggagagaatcataaacgtggtgaatgatgattgttagcaaggaaaactgtcaaaaatcttcaaaaaatttgagggataaggccggaattgctccggccagagggaagttaaccgcgaagctgttgctgcttgagggtcgttttaaccagacgccaggcgctccatacgccaaaaccgcgtctggcccagcggaccagcatattaggatggcgaatcgtccagatcgccatcacgctactgccaaccagcgcccaggagcgcagacttagcagcatattccagcgacgatcgtaagcgcctgttgcctccagccattcacgacgactggcggaaagatccagccgttgttgctggatctggctaagcagttgcgccttacgtcgttcacgttcgactttactgctcacgggactcctcctcgagcagttgccgatcgtttgccagctcatggcgtgtatggcgcagcaaggtggatttacgcgatttacgtaacgtccagataccgccaatcagtgccagtagcagcaacaccacggtggtggcaatcatcgcattcaggcgatattgcggatcaaccgcccaaataattagcaccatcaggctcataagaccaaatgcagcgaaaagcatcgtcaggcccagcatcagtaaaagttgaaagagattagctttttcctcttccagctccaccaccgccagccgcagacgtgtttccaccatttcaaccatgatggaaacaattcgctgcccgatgcccagaacgcttttaccgggcccttgcgcgtgatgagtgtccgccataattaacgacgcgacagcagaacgccgagcactacaccgattgcagcgccaatgcccacgccggtccacggattttcacgcacatactcatcagcacgcgccgccgcgacacgggtttgtttggcgatggcatcaccggtttcacccaggcgataacggctctgtttcagtgcctgctccgctttgctacgaatcttactcaactcttctttcgacttctcgccagatgagctaagcacctcttccagcgtatcggaaagggatttcaactcagcacgcagatgttccgtagtgtgttctttcgacatagttttctccaggtgagtaagtagtgactattgtgagttagtagtcgcgcgcttccagctttttcagctcttcctgcgcttctgccagtttccgttcgcgtttggcaatcttatcggcatcgcctttttgcttcgcctcggctaaatcttgctggcgttccgccacctcatctttctgctttgcgattttcttgtgatgatcggcacgcagctggctatctgaacagttggcccggacttcactcagggctttattcagaccgtcaatacgattctggttttggtgtttttcggcatagctgatctccttaaggatattttgctccttttcctgacacagggtagtggcataactaccggcactaagagcaaagagagaaacagctaaagcgatgcggtatttcattcttgaaccttccattgtgattcggacctattacaaaggaacgattgtccagacaacgaagcggtagtgttaaccaccgcctcattaatcatagacagttacggtgaaatcaccaaagtgagtgatatgtttcggataacaggaagttatccgaagcgatgagagttatcccgtaaccgggtcagccactgcatagcctgactgttattgtcctgctgcgcaatgatgtagccatggggcaatgttctgtcgaggaccgcttttgcggcggcgctctggtcgctggagtcaaatgtaattaacagagtgtcgtttttgggggtgatgcttttgaaaggaatgccatgagcgtcaaggtgatgccagatcgaaaaaccgtctggcatcgttgtgccttgatgaacggcacgaatcgccagcgtagactcttgctggcgaaccgcggaccaggccagcaacagcgtgccgaccagaagtaaaacagtgccggaccaggctagctggcgaagcgacatgcgaggtatttgcatcccttacccccgatttccatatttctttttccataacacgaccagagaacctgccaggccaaacaccagcagcaccaccgggagcagcatcaggcatgacatcagctggtcctcgtactttaaaaataccggcgttttgccgagcatgtaacccagagttgtcaggatcaatacccacagcagaccgctcatccagttgaaaaactgaaagcgcgcgttattcagccctgataacccggcaatcgtcggcagcagtgttctgacaaacgcaataaagcgaccaattaacagcgccgataaaccgtgtttatgaaaaagatggtgtgcgcgttgatgataatgcgcgggtaaatgagatagccagttttgtacggtgcgggtattgcccagccatcgcccctgaatatagctgacccagcagccgaggctggcggcaacggtcagcagcagaatcgtttgcgggtaacccatcgcgcctttcgcaatcaacacgccgaccaataccagtaaactgtcgcccggtaaaaaggccgctggaagcaagccgttttcaaggaacaaaattacaaacaagacaaaatacaacatgccaatcatcgatggattggccagggtttcaaaatcctgcgcccacagggcttgcagcaattgggtcaaaagttccattcattattcctggtgaatcggttaacgccacgctggttttaaaagatgcactaccgcaatgttattgctgttttggtatgttctgcgggtttgatacatcaacacagcctgaactattccctgttaaatcgtgagataagaaagcattcaaaaacataaattcaaattgaatctaattgtaacaaaggtcaacgttgttcgttatcaaaattacatgtccgtggagtctgattttgctgaatgcaggggagggtggcgagaggatttacacaggctgacactttatacttttcgcttacccacgagacaaacaggcgcgtcgcagcgcctgtcggacaggtatttcatttactgccactcgtgaccgtatcgagatgcaccaccgggttttcggcgaatagatagcggtcggcattgaactcgaagtcgtcgctggtttcgttgaataacatgatcttggtgttttccaggtgctgccacattgccagcttagcagcatgaggatctttgcgaatcagcgccttgaggatttgatcgtggtcatcacaccagttatcgacggtacgggaatcaatgtgttcgtgcagttttttccagtacgggttatggctacgttgtgtccacattttttcaacgatggccgccagggcggagttctgcgtcgccagggctacctgaatgtggaactgtaaatcccactcggaatcacggaagcattgttcgccgcgcgcctgttcctgaatggccatcagtttcatgatgtcctgtttcgttacctgagttgccgcgaattcggcaatattactttcgatgagctggcgagcctgaagcaactcaaacggaccgtaattggcgaattccatattattgtcagctgcctgctgatggcgcggctggttggaaaccacatgaatacctgaacctttacgcacttcgacatagccttcaacttccagcatgatgatggcttcacgaactaccgtacggctgacgttcttttcatcggcaataaagcgttctgcaggcagtttatcacctaccagatagacgccctgttcgatgcgctctttcaggtcagcggcaagttgttgatacaaacggcgtggttcagtgatttccatatgcgtctcccggagtggaatgcggacgaagttatcataccactttattcatgggtatgccattggtcatatataaatttggtgattgaattaatgtattgaattaatattgtgaatatttataaattcctaaaaaataagtatcgtcattgtgaaagctactaaatttcagtaagttaattcccagcctttaaatttaatattaactaaaaatgcttttttatattgacttacaataaatctacatctctaatacaccaactttttggaaacaatattgtaagatcaaatttatatggtggcgaaaattaatctcttatcacggcttacgccgcttttattcgtgttcgctccttttttggcacagtcaaatatgactgtttatcctatggctgtttccattaatagtcagggtgaaggcaacgttcgcgtaatatctaaaagtaatgaagttcagtacatcaaggcgacagtattccgtatcgataatccatcgacgcctcaggaaaatgaagttgagattaaatccggtgatgcaaatcatctggttgttatgccacctaaattcgctttaccagccggtagtagcaaaaccgtacgttttgttgcgatggaaccagagcaaaaagagaaaaattatcgcgttaaatttgaagcggttcccagtattgatgacgttgccacagataaaaaagatctctctatgcagttaacagttaacttaatttgggggattgttgttagtgttccacctcagcaacctattgctaagttagaagtaaatgctgcccaaaaattagttaatgcagggaatcaacgcttaaagattttaacgatcgcttattgtaaaaataatagcaaagaaaattgtaagatacagaccgtaaataaaaacatcttccctggtcaggaaagaaatcttgaaagcatatctggctacgacaaaatcgttgtcaaatataataactggatcaccaaagataatggcgagtttgaactggcggtccattaattatcattgtaataaacgaaggaatagtaatgaaaaaggtatttgcaaaatctcttctggtcgcagcgatgttttctgttgcaggctccgcattggcagtacaaaaggatattactgtaacggccaacgttgatgccgctctggatatgacacagaccgataacaccgcgttgccgaaagcagtagaaatgcaatatctgccggggcagggtctgcaatcttaccagttgatgaccaaaatctggtctaacgacgttaccaaagatgtaaaaatgcagttagtgtccccagcgcaactggttcaaagcctggatgctagcaagattgttccgctgacagtaacctggggcggtgaagaaattaaagctgatgcggcaaccacttttaccgcaaccaaaatctttgcttccgatgcgttaactaacggttctctggctaaaaacctgatgtttgctcaaaccaccaaaggtgttctggagacaggcatctaccgtggtgtagtaagcatttatctgtctcaggatatctaatccagataacagaattaacacgtaacaaagggaggggtagccctcccttattttaactgttttagtatttgttatggatttcaggattgccatggataaaaaattactggctcttttgatcctggcgagtctcagcccggcagaggcgacattaaccaaaattcccgcagggtttgaggttattgctcagggacagcaggagtatatcgaggtttatttttcagggaaaagtctcggtaaatattatgcaatggttaatcttgataccgtaacatttcttgatccagcaagtctatataacaagctggagctggatgtagacgatcagaaaatcgcgcatatagtgaaagaaaaattatcgcagccgctagctcgccacggtgaattggcttgcggttatgtacgtactgactcagggtgtggttttctgaataccgatacgctggaaataatctataatgatgaagaaagttcggcaacgttgtttattaatccgcaatggaattcagctttcgatgcgaagtcattatatttaaatccagacaaaaatactgttaatgcttttatacatcagcaagacatcaatgttctggcacaggatgattaccaatcgttgtctattcagggaaacggtgcgctgggaataacagaaaatagctatattggtgcacactggaatttcaacggttatgatgcagatgatgtcagtgacagtaatgctgacgtcagcgatctctattatcgttatgattttttacgtcgttattatgtgcaggcgggtcgcatggacaaccgcacactatttaatgcacaaggcgggaactttacctttaactttctgccactcggtgcaattgatgggatgcgtatcgggtcgacactgagctatttaaaccaggcgcaaagccagcaaggaaccccagtaatggttctgctttcgcgcaattctcgtgttgacgcttatcgtaatgagcaacttttgggatcgttttatctcaatagtggttcgcaatttattgataccagttcctttccgcctggcagctacagcgtggcattaaaagtctacgaaaataaccaactcacccgcaccgagcttgtgccgtttaccaaaaccggcggtctgactgacggaaatgcgcaatggttcttacaggcaggtaaaactacatcacaggtttctgatgatgaaagttcagcttatcagctaggagtacgcctgccattacatccgcaatatgagctctacgcagggctggcgaatgccgatgatgtgagtgctttcgagttaggtaataactggacggcagatttaggcggggtggggaatcttgcaatcagcgccagcgtgttccgtaacgatgacggcggcaaaggtgatatgcaacaggccaactggagtaatccgggatggccgacgttgggcttttatcggaccaactctgacggcgatgcttgtacaaccgacagcagagagagctataacgccttaagctgttatgaaagtatttccgcgacggtttcacagaattttgtcggctggaatatgatgctgggttatacccgcacacaaaataacactgatgatagtttgcgttgggataaacagcagagctttgaaaataactatcttcgccagacaacagcgcaaagtatctctgaaactgtacaacttagcgcttcccgcgcttttgtgatgcgtgactggattttgagtacgtcagtcggtgttttccatcgtaatgacaacggtggcgataacgacgacaacggcttgtacttatcgttttcgttatctgacacgccaacgatggatagcaataacaacagccattcaacaaatgtgtctacggattatcgttatagcgaacaggatggcgatcaaacgtcatggcagttatcgcataccttttataacgattcattcagccataaagaacttggcgtaaccgtcggaggcctgaacaccgataccataaacagcgcggttaacgggcgttgggatgggcaatacggaaatgtctacgctaccgtatctgatagttatgaccgtaagaatcatgatcatctttcggcctttacgggcacttatagctctacgctggctgtcagtcgctatggcgttaatttgggagccagtggtacagacgatttgctgggtgcggtactggtggatgtgaaaggcttctctgaacaggatgaagagagtcaggatctgcaactcgaagcgcgggtggcaggcagccgaactttgcagcttggtcaaagtgacagtgtgttgttcccttatcctggatttcagtctggttttgttgaggttaacgacagtagccagggcaatcagcaggggacaacaaacatcattaacggtgcagggaatcgtgaattaatgttgttgcctggcaagctgcgctatcgcgaagtgtctgccagctttaactacaactatatcggtcgtttattactgccggcagcggtgaaaaaattcccgattgtggggctgaacagcgccatgttactggtagctgaagatggcggatttacacttgaaattaacggcagcgaaaaagagctctatctgctttccgggcagcaattccttaagtgtccactaagtgttgtaaagaaacgcgccagcattcgttacagcggagatgttacttgtagtgtggtgacttattcacaattaccggagtcgattcaggttcaggcacagttgaaacagcctaaattacgtggaaacgttcagacggcgcaaagggaggttgcaccatgagaaatcgattgattgcggcgatattgggcttgtttggcacgctcactggcgttcaggcagctcctgacgtgaccagtgaaattacgtatgatttggcatctggtagagcggattattacttctggaaggatgaagcgtcggcaggaaataatggatatatgtggtatgaatgttcgtatcctgacctccaacaaacctgtacagctaatggaaatatatcgacagtacaaatctatttaactgaacaacgcagtgggatgcgttggccggtaaaactcaaaggatttaaaacagccattgtaagtagcgatgaagcgccgccaggatgcaaggggggcaaagggcttcagacgaatcttaaggattctaatagatcttcatgtacagaagatggtcaacattattatatatacgatacaaagtttcttacgctctaccttgagcagacagagatgaagaatttgccgattggtggcgtctggaaggggaaagttaaattacattcgaacagcccggcccaggactatttcgcaaatattaccctgaatacgctcgaccccaaccatattgacgtgttcttcccggagttcgcccacgccacgccaagggtgcagttagacttgcatccaacaggaagcgttaacggcagcaactacgcgcaagatctgaccatgttggacatgtgcctgtacgatggttttaacggtaatgccatcagttatgaaatcatgctcaaagatgaagggcgaccagctgcagggcgcagagacggttacttctctatctatcgtcagggagggaccaccaccgacgagggagaacgcattgattaccgggtcaaaatgtacaacccggaaaccggtgggcaaattgatgtgcgcaataatgaaaatatggtctggaacagcattaacctgaaacgtgtgcgtccggtggtactgcccggtattcgctatgccgtgatgtgtgtgccgacacccttgactctggcagtcgataaattcagcgtgatggataaacaggccgggtactacatgggcaaattgtcagtaatctttacgccttccttgccaaccatcaattaaccctgcaaagcggacaaacgcttttttctatataaacgacgaagccgtctgataaagcggcttcgtcattacaacttaagttaaacgttaatgttgcggtgcgggatcgttatgtgtttcctgcgccacctcaatcgccggtttgttctgcaacacggtccagataaccagcgcacctaacaggtcaaatactgccagaactgcgaacagcgggctgaagccgatggtgtcagccagtgcaccgacaaccagcgcaaacagcgtacttgccagccatgcggacatcccggttaaaccgttcgccgtcgccacttcgttacgaccgaacacgtcagaagagagcgtaatcagcgcgccagacagtgcctggtgggcaaaaccaccgatacacagcagcataattgcgacatacgggttggtgaacagaccgatcatacccgggccaatcatcagcacagcacccagcgttacgaccatcttacgggaaacgatcaggttcacaccaaaccaacgctggaacagcggcggcaggtaaccaccgaggatacaaccgaggtcagcaaacagcatcggcatccaggcgaacatcgcgatctctttcaggttaaagccgtaaactttaaacatgaacagcgggatccacgcgttaaaagtaccccaggccggttctgccaggaaacgcggcagcgcgataccccagaactgacggttacgcaggatctgaccaacggacattttcttcgccgtgctcacctggtgctgggcttcctgaccattaataatatagtcgcgttcttcatcggtcagatgcttctggtcgcgcggatgtttatagaaaatcagccatgccatcgcccagataaagctcaatgcaccggagatgataaatgccatctgccagctgtgcattacgattgcccataccaccagcggcggcgcaatcatcgcaccaatcgaagaacctacgttaaagtaacctaccgcgatggaacgctctttcgccggaaaccattcggagctggctttcagacccgccgggatcatcgctgcttccgcggcaccgactgcaccacgagcaatcgccaggccaccccagctaccagccagcgcggttgcaccacagaatacggcccacagcacagcaaacattgcataaccgattttcgtacccagcacatccagtacatagcccgctaccggttgcatgaccgtataagcagcagaataggctgcgatgatataggaatactgttgggtggagatgtttaactcttccatcagagttggcgcagctgccgccacagtgttacgcgtcaggtaaccaagcacggtgccaagcgtcaccagtgcgatcatataccaacgtaaccctttaattttacgcatgtaaaacctcatcgttttgttatatccgcaggaagcgcggccatcatcccgccagaggctgaagatgttagttacgaccgggtaaccgaaaaaaaaccggcacgccccgaacgttgccatgaaagtttcgtgctaattcggcttccgtaccggttaacccgattcatctaacaaatgaatgaatcggcaatttgcattccgtcgacttatgatttgcgacggcagaaagataacttgtcatacaactttaaaaggtgagagccatcacaaatgtgcgaatatttgtagggacattacctgacgacagcgaggccagtactggcgcggcctgcagcgagatttaccactttgagagtaatttttttaactacgtttattgatctaactcacgaaaatatcttcggactctggaaattggtgtgataactttgtcagcatcgcaccataagcaagctagctcactcgttgagaggaagacgaaaatgactccgtttatgactgaagattttctgttagataccgaatttgcccgccgtctgtatcacgactacgcaaaagaccagccgattttcgattaccattgccatttgccgccgcagcagattgcggaagactatcgttttaaaaacctgtatgacatctggctgaaaggcgatcactacaaatggcgcgctatgcgtaccaacggtgtggctgagcgtctgtgtactggtgatgcgtctgaccgtgaaaaatttgacgcctgggcggcgactgttccgcacactatcggcaacccgttataccactggacgcacctcgaactgcgtcgtccgttcggtatcactggcaaattgctttctccgtcaactgccgatgaaatctggaacgaatgtaacgaactgctggcgcaggataacttctccgcgcgcggcatcatgcagcagatgaacgtgaaaatggtcggcaccaccgatgacccgatcgattctctggagcatcacgcagagatcgccaaagacggctctttcaccatcaaagtgctgccgagctggcgtccggacaaagcctttaacattgaacaggagacctttaacgactacatggcgaagctgggcgaagtttccgataccgacattcgccgctttgctgacctgcaaactgccttgaccaaacgtctggatcacttcgccgctcacggctgtaaagtgtctgaccatgcgctggacgtggtgatgtttgctgaagcgaacgaagcggaactggacagcattctggcgcgccgtctggctggcgaacccctgagcgagcacgaagtggcacagttcaaaactgcggtactggtgttccttggtgccgaatatgcacgtcgcggctgggtacagcagtaccacattggcgcgctgcgtaataacaacctgcgtcagttcaaactgctggggccggatgtaggctttgactccatcaacgaccgtccgatggcggaagagttgtctaagctgctgagcaagcagaacgaagaaaacctgctgccgaaaaccattctctactgcctgaacccgcgcgataacgaagtgctgggcaccatgatcggtaacttccagggcgaaggtatgccgggcaaaatgcagttcggttccggctggtggtttaacgatcagaaagacggtatggaacgtcagatgacccaactggcgcagctcggtttgctgagccgctttgtcggtatgctgactgacagccgtagcttcctgtcatacacccgtcacgaatacttccgccgcattctgtgccagatgatcggtcgctgggtggaagcgggcgaagcaccggcggacatcaacctgctgggcgagatggtgaaaaatatttgctttaacaatgcgcgtgactacttcgccattgaactgaactaaggtctggggttgatatgcaatacatcaagatccatgcgctggataacgtcgcggtcgctttagcagatttggctgaaggcacagaagtcagtgtcgataaccagactgttacgctgcgccaggatgttgctcgtggacataaatttgcgttaacggatatcgcaaaaggggccaatgtcatcaaatatggcctgccgattggttatgcattggcggatattgcggcgggggaacacgtccacgcccacaatacgcgcacgaatctgagcgatctggatcagtatcgctatcaacctgattttcaggatctgcctgcgcaagcggcagatcgtgaagtgcagatctatcgtcgcgctaacggcgatgtcggggtgcgtaacgagctgtggatcctgccaaccgtgggctgtgtcaacggcatcgcgcggcaaatccagaaccgtttcctgaaagagaccaacaacgccgaaggtaccgacggcgtgttcctcttcagccacacctacggctgctcacaactgggcgacgatcacatcaacacccgcaccatgctgcaaaacatggtgcgccacccgaacgcgggcgcagtgctggtgattggtctgggctgtgaaaacaaccaggttgccgcattccgtgaaacgttgggcgatatcgatcctgaacgcgttcatttcatgatctgccaacagcaggatgatgagatcgaagccggaatcgagcatttgcatcagctgtataacgtgatgcgcaacgataaacgcgagccaggcaaactcagcgaactgaagtttggtctggagtgcggtggttctgacggtctttctggtattactgctaacccgatgctggggcgtttctctgactacgtgattgctaacggcggtactaccgtactgaccgaagtgccggagatgtttggcgcagagcagttgctgatggaccattgccgcgacgaagcaacgtttgaaaaactggtcaccatggtcaacgacttcaaacagtactttattgcccatgaccagccgatctatgaaaacccatcgccggggaacaaagcgggcggtatcaccacgctggaagataaatcccttggctgtacccagaaagcgggttccagcgtcgtggttgacgtgctgcgttacggcgagcgtctgaaaacgccggggctgaacttgttaagtgcgccgggtaacgatgccgtagcgaccagcgccctggcgggtgcgggctgccatatggtgctgttcagtactggtcgtggcacgccatacggcggctttgtaccgacggtgaaaatcgctaccaacagtgaactggcggcgaagaaaaaacactggatcgactttgacgcgggtcagctgatccacggtaaagcgatgccgcagttgctggaagaatttatcgacaccatcgttgagtttgccaacggtaaacaaacctgcaacgagcgtaacgacttccgcgaactggcgatcttcaaaagcggcgtaacgctataaagtcgaaatgagttgttaataaaaaacggcgtttcataatgtgaagcgccgtttgcttttccatacctgctaaggatttatcatgaccgcgtattggctggcccagggcgtgggtgtcatcgcctttctgattggtatcacaacatttttcaatcgtgacgaacgtcgcttcaaaaagcagctttcggtctatagcgccgttattggcgtacatttttttcttctgggcacctatcccgctggtgccagtgccatccttaatgccattcgtacattgattaccttacgcacgcgcagcttatgggtaatggcgatttttattgtgctgactggcggaattggcctcgcgaagttccatcatcctgtcgaactattgccggttatcggtacgattgtcagtacctgggcgctgttccgctgtaaagggctcaccatgcgctgcgtgatgtggttttcaacgtgttgctgggtgattcacaacttctgggcggggtcgataggcggcacaatgattgaggttagttttctgcttatgaatggcctgaatatcattcgtttctggcggatgcagaaaaggggaattgatccgtttaaagtagagaaaacccctcccgccgtagacgaaaggggttaaacaattaattacgcagggcgctatttgccagacgatcgtcttccgcctggcaagctgccgcagtgaacagcacgtcagttgaagagttcagcgcggtttcgcaagagtcctgcaatacgccgatgataaagccgacggcaaccacctgcatggcgatatcgttcgaaataccgaacatattacaggccagcgggatcagcagcagagaaccccccgccacgccggatgcgccacaggcacacagagaagccaccacgctcaacagcagcgccgtgggcagatcgaccgggatacccagcgtattaaccgcagccagcgtcaacacggtaatggtgattgctgcgcccgccatattgatggtggcacccagcggaatagaaacggaataggtatcgcgatccagattcagcttttcacacagtgccatattcaccggaatgttcgccgcagagctgcgggtgaagaa

SEQ ID NO: 248 - DNA, 17836 bp, Escherichia coli
  source 1..17836: mol_type = genomic DNA
atataaatattatctgcataatacgtcagtgagtcggttgcatagacaagggaataaaaaccttaattatcaacgtcactatattaagattacccgcctgctggagaaattaaatcgaaattatgccgacaaaattacgatttatccggaatttcatcagcaaataacttacgaagcattgcgtgtttgccatgcggtgcgcaaagagccggatattcttacccgccaacggatgattgccgagatatttacttccggtatgtataagcgcctgattaccaatgtgcgcagcgtgaaggtcggttaccaggcgttactgtggtctttccgcttatggcaatggcgcgacaaaacgcggtcgcaccatcgcattacgcgtagcgcctttaatttgcgctagcgttaaacttcgccgcttcgggctgtttgccccagccttgccactgatgctggaagtaaacgatcagcgtgctctggctgatgctttcgcttaatacttcaaagaagcgattagcataaacaggttctatcggtttcttcggtttgcacagcttcacgccacggaacggattacgcggtgcatcaggcacagcgtttttcggcggtgtagaagtatcaacctgcggttcattcagcaagctgctggctttcaccagcgtaatgtctggcggcaggttataaaccatctgttgtagcacgcgtaccgttgaagggtgaggatgcccaatggcaatggttgaaccgttgcgacgcgccagatcaattgcgcgattaaattgcacacggatgtccgcttcgttctgcgaatcgtcgaggaacaccttccgtttgatcaccttcacgccagtaccttgcgcggcgcgcatcgcctgggtattaccgatggttacgctgtcgaggaagtaaagattgtaacgctccagtgcctgcatcactttctgcataccaaacaggttagaggtcatcttgctacccatgtggttgttgatccccacggcatagggcacgttattgaccgcactacgaataatgcgctcaatttcgtcgctgctcatctccgggcgcagcgtatttttctccagcggctgtttactcagtggtgccatcgggagatgaatcaacacttcgtgcccgctgttatgcgctttggtcgccatctctctggcgtgcggtgaatcgggtaatacagcgacggagatagcggagggcatcgccagcacctggttttcgttgtgcgggcgatacccaaaatcatcaatgacgatggcaagtttgccagcaagtacgggggaggagagcgccaacagagcggcaaatgcaagaacgttacgacgaaatggaaacaaaacttatcttcccaaccacggctgtggattgaccgcctgaccctggcggcgaatttcgaaatagagtgaaggccgaccctgaccgccactgctgcccaccagtgcaattggctggcccgcgcgaacctgcgaaccaacgctcaccagtgcgctctgattatagccgtaaagactcatgtcgcctttaccgtgctcaaccaccaccaccagaccgtaaccttgcagccagtcagccagaatcacccgaccgtcggcaatcgctttaacttcagtaccttcagaggcaccgataaccattcctttccagcgtagttcgccctgtagctgttcaccatagcgatgcagcgtcggcccgcgaaccggccagaatgcctgaccacgcggcgcacccaggccaccagttcgggacatcagcgatttttcgctttcggtcggtttataggtggtgcctttgcgcgtcgcttctttctggcggtcgcgaaccgcctgggcctcacgcgcttctcgttcagcacgcgctttcgccgcggcttccgcacgggcaatgctgttacgcagacgggattcgttggcacgcagttcacttagctgctgctgaccttgctggatggaagattccagccccgccagcgtctttttacgctcgttcagagcctgagtcagtttcgcctgttgggcgcgctgttcatataacagcgtttgttgctcgctctgtttctcttccagttcagcacgctgcatggcgacttcttcacgcgtttgcttcaactgggcaatggtttcttgtcgcgcctggttgagatagccgaaataagcctgtaaacgctgtccacgctggctttcttcaccgctgagaattagctgaataccggtatgctcgccctgacggaatgcggcatccagttgtgcggcgaggctgcgctcctgggcggctttttgctgctccagtttggcaatcgacgcgttcatctcatcaatctgtttattgagttgattgagcgtgttttgcgtttcgcgcagcttacgggtggcttcagagatcgcttcttcctgctttttcaattgtgcgagcaggcttgcgcgttgttgttgcttttggcgtaccgcgcgctctttcgcggcgatatcggcctgaatagatttgagttggtcacgctcatccgcgtgggcggaaaaggcgcacaacaatacgccagcgctaagaacgctggcgtagatgatgggcctgattgcaaacctgcgcggtttcacggcccgtgtcatggtattaatcgcctttcccctcatggggagggattattccacgatgaacagcggcttaccagtcatctcttgcgggatttccatacccatcagcgacaacatggtcggcgcgatgtcagaaagtttgccgcctgcaaccgctttcacgttcttatcaccaacgtaaatcagcggaactggcaggttggtgtgtgccgtgtgtgcctgacccgttgccggatcgcgcatctgttcagcgttaccgtggtcagcggtgatcagcagttgtccacccacggactcaaccgctttcgcgacttcttccacgcagtgatccagtgcttcaaccgctttaaccgccgcttccatcaccccggtgtgacctaccatgtcgccgttcggatagttacagataatggtgtcgtatttgccgctcttgatggccgcaaccagtttttcggtcagctctgcggagctcatttccggttgcagatcgtaggtagccactttcggtgagttgatcagaatgcgatcttcgcctttgaacgactcttctacgccaccgttgaagaagaaagtaacgtgggcatatttttcggtttcggaaatacgcaactgagttttgtcgtttttcgccatccactcgccgaaggtgttaaccagggaagcgggtgggtaagcaaccgcagttttgatgtcagcggcgtattcggtcagcatcacgaaatcgacgttaaccactttcttacgcgcgaagccgtcgaaatctgcgtttacgaatgcacgagtgatttcgcgcgcgcggtcagcacggaagttcatgaaaatcagcgcatcgccgtcttccattgccgcatctggctgaccttctgcacgaataacggtcgctttcacgaactcgtcgttttcgtcgcgagcataagctgcctgcaaaccagcaacggcagtatcggcctggaactcaccctgtgccagagtcagcaggtcataggctttttcaacgcgatcccaacggttatcgcggtccatcgcgtagtaacgaccaatgatggacgctacgcggcctttacccagcgcagcaaatttctcttcaaattttttcagcgaggattcagcactgcgcggcggggtgtcgcgaccgtcaaggaatgcgtgcaggtagattttttctgcgccgcgttcagctgccagttctaccatcgccatgatgtgatcttcgtggctgtgtacgccgcctgcggagagcagacccataatgtgtactgctttacctgcgtttttcgctttatctaccgcgccagtcagcactggattagcaaagaaagcgcgatctttgatttcaacgtccagacgagtcaggtcctgatacacgatgcggccggcacccaggttaacgtggcctacttcggagtnnnnnnnnnnatctgacggtcaggcagaccgacttccagaccggaagcgtcgatcagggtatgcggacgattggcccacagtgcatccattaccggggttttagcactaaaaatggcgttatcctgctgttcttcacgatagccatagccatccagaatcaccagtaccataggttttttagaaaccgacattgcgacaacctcatactcaagagtcaaaatttgcgtaattttactacagctgaatcgataaaatagcctctgaagatcaaaatatacgaccgctcgcggcaagccgatgccagatttgcgcttttttttcgtcgtgccccgcaaaattgcattccagttaacgcgctggctgtatttgccgcaccgcgcaggtatactcctttcctggtttttttaatcactacgtcgggagttgttaccccccatgcaagaaattatgcaatttgttggccgtcatcccatactgagtatcgcctggatcgcgttactggtggcggttcttgtgactacgtttaagagcctgacctcgaaagtgaaggtgattactcgtggtgaagctacgcgtctgatcaacaaagaagacgctgtggttgtggatttacgtcagcgtgatgacttccgtaaaggccatatcgcaggttctatcaatctgttgccgagcgaaatcaaagccaacaatgttggtgagcttgagaagcacaaagacaaaccggttatcgtggtagacggttctggcatgcagtgccaggagcctgcaaacgcactgacgaaagctggttttgcgcaagtattcgtgctgaaagaaggcgtcgctggctgggctggcgaaaacttgcctttggtgcgcggcaaataatttacctgtcgtctttcatgatgcaggccgttagctgcaattaggcccccagcgacttattgttataagcttctggggacactccattttgcagccgccctgcaacatgaaatttcagggtaaaaaaacaggagctaaattatggccaatgttgaaatctataccaaagaaacctgcccgtattgccatcgtgcaaaagcactgctgagcagcaagggcgtgagttttcaggagttgccgatcgatggcaatgccgccaagcgtgaagagatgatcaaacgcagcggtcgcaccacggttccccagatttttattgacgcacagcacattggcggctgtgatgacttgtatgcattggatgcacgtggtggactggatcccctgctgaaataacgtgtgaacgttggcattacattgcgcagtatttaaggacaacacttaagggttttctacacatgtcagaacaaaacaacaccgaaatgactttccagatccaacgtatttataccaaggatatttctttcgaagcgccgaacgcgccgcacgttttccagaaagattggcagccagaagttaaacttgatctggatacggcatcttcccaactggcagatgacgtttacgaagtggtactgcgtgttaccgtaacggcctccctgggcgaagaaaccgcgttcctgtgtgaagttcagcagggcggtattttctccatcgcgggtatcgaaggcacccagatggcacattgcctgggcgcatactgcccgaacattctgttcccgtatgctcgtgagtgcatcaccagcatggtatcccgcggtacattcccgcaactgaaccttgcgccggttaacttcgatgcgctgttcatgaactatttgcagcagcaggctggcgaaggtactgaagaacatcaggatgcctgatgaaccaacgtaatgcttcaatgactgtgatcggtgccggctcgtacggcaccgctcttgccattaccctggcaagaaatggccacgaggttgtcctctggggccatgaccctgaacatatcgcaacgcttgaacgcgaccgctgtaacgccgcgtttctccccgatgtgccttttcccgatacgctccatcttgaaagcgatctcgccactgcgctggcagccagccgtaatattctcgtcgtcgtacccagccatgtctttggtgaagtgctgcgccagattaaaccgctgatgcgtcctgatgcgcgtctggtgtgggcgaccaaagggctggaagcggaaaccggacgtctgttacaggacgtggcgcgtgaggccttaggcgatcaaattccgctggcggttatctctggcccaacgtttgcgaaagaactggcggcaggtttaccgacggctatttcgttggcctctaccgaccagacctttgccgatgatctccaacaattgctgcactgtggcaaaagtttccgcgtttacagcaacccggatttcatcggtgtgcagcttggcggtgcggtgaaaaacgtcattgccattggcgcggggatgtccgacggtatcggttttggtgcgaatgcgcgtacggcgctgatcacccgtgggctggctgaaatgtcgcgtcttggtgcggcgctgggtgccgatcctgccacctttatgggcatggcggggcttggcgatctggtgcttacctgtaccgacaaccagtcgcgtaaccgccgttttggcatgatgctcggtcagggcatggatgtacaaagcgcgcaggagaagattggtcaggtggtggaaggctaccgcaatacgaaagaagtccgcgaactggcgcatcgcttcggcgttgaaatgccaataaccgaggaaatttatcaagtattatattgcggaaaaaacgcgcgcgaggcagcattgacgttattaggtcgtgcacgcaaggacgagcgcagcagccactaaccccagggaacctttgttaccgctatgacccggcccgcgcagaacgggccggtcattatctcatcgtgtggagtaagcaatgtcgtgtgaagaactggaaattgtctggaacaatattaaagccgaagccagaacgctggcggactgtgagccaatgctggccagtttttaccacgcgacgctactcaagcacgaaaaccttggtagtgcactgagctacatgctggcgaacaagctgtcatcgccaattatgcctgctattgctatccgtgaagtggtggaagaagcctacgccgctgacccggaaatgatcgcctctgcggcctgtgatattcaggcggtgcgtacccgcgacccggcagtcgataaatactcaaccccgttgttatacctgaagggttttcatgccttgcaggcctatcgcatcggtcactggttgtggaatcaggggcgtcgcgcattggcaatctttctgcaaaaccaggtttctgtgacgttccaggtcgatattcacccggcagcaaaaattggccgtggcattatgctcgaccacgccacgggcatcgttgtgggtgaaacggcggtaattgaaaacgacgtatcgattctgcaatctgtgacgcttggcggtacgggtaaatctggtggtgaccgtcacccgaaaattcgtgaaggtgtgatgattggcgcgggcgcgaaaatcctcggcaatattgaagttggtcgcggcgcgaagattggcgcaggttccgtggtgctgcaaccggtgccgccgcatacaaccgccgctggcgttccggctcgtattgtcggtaaaccagacagcgataagccatcaatggatatggaccagcatttcaacggtattaaccatacatttgagtatggggatgggatctaatgtcctgtgatcgtgccggatgcgatgtaatcatctatccggcatacagtaactaatctctcaacaacgctcccggatatcccagctgccgccaggcttcatacaccactaccgacaccgcattggacagattcatgctgcggctgtccggcaccatcggaatgcgaattttttgttcagcgggcagggcatcaagaatgctcgctggcaggccgcgtgtttccgggccgaacatcagataatcgccatcctgatagcttacggcgctgtgagcaggcgtacctttcgtggtgagggcaaacaggcgctggggattttctgcttcgaggaacgcgcgatagtcatgatgacgcgtaacggcggtaaactcgtgatagtccagccccgcgcggcgcaggcgcttatcgtcccaggcaaatcccatcggttcgatgatatgcagacgaaagccggtattagcgcaaagacggatgatgttgccagtatttggcggaatttctggttcgtaaagtacgatgtttagcatactgcccccttagtgcgggggcaggatagcagaaaattggtgagcagtgcggccttttcccctcaccccggaggggcgagggagaaaaaaagagtgcggtgtcgtttcagagtgagggagtacatacagcgccgaacggtccccactccctgagggagagggttagggtgagggggctcaaacgactatgccgcattccctttcgccatcggagccagtgccgtaggcaactctttacccagcccctgcaccagcgaatcttgcgtaatttcactgatcgatttcgcgccagtcagcgtcattgccactttcatctctttctcgatcagatttagcaggttagctacacccgcctggcccgctgttgccagcgcatacaggaaagcacgacccagcagtacggtgtcggcaccgagcgcaatcatacgcacgacatcaagcccgttacgaattccgctatccgccagaatggcgatatcacctttcaccgcatcggcaatagcaggcagtgcacgggcagaagagagcacaccgtccagctggcggccaccgtggttagaaaccacaatcccatcagcaccaaaacgtactgcatcgcgcgcatcttccggatcgaggatccctttgatcaccatcgggccatcccagaaatcgcggatccactcaaggtctttccatgagatggacggatcgaagttattccccagccagccgatgtaatcttccagtccggtcggtttgccgaggtaagccgaaatatttcctaaatcatgcggacgaccgttcaggcccacatcccacgcccattgcggatgcgtcaccgcctgcaaatagcggcgcattgccgcgttcgggccgctcattccagaatgcgcatcacgataacgcgctcccggtgtcggcatatccacggtgaaaaccagcgtcgaacaacccgctgcttttgctcgctccagcgcgttacgcataaagccgcgatcgcgcagtacataaagctggaaccacattgggcgcttgatggctggcgcgacttcttcaatcgggcaaacggaaaccgtcgagagagtaaacggaatgccatgcgcatccgccgctttggctgcctgaacttcgccgcgtcgcgcatacatgccacacaaacctaccggacctagcgccaccggcatcgacaatttctcattaaacagcgtcgtttccaggcttaagtcggacatgtttttcagaatacgctggcgcagcgccacttctgacaaatcttccacgttgcggcgcagcgtgtattcagaatatgcacccccatccatatagtggaacaggaacggcggcagaatgcgttgcgctgcggcgcgataatcgctggctgcggaaataatcatgcgtttttctccctcgaatgctcattatgctcaccgggcaggcgggtaatccgtgcgtggcgagcctgatcttcatcgaatcgtttcatggtggtgtgaacaaaactaaggtgcgccatcattgctttacgcgccccgtcggcatcaccagcaaaaatggcgtcaatgacagcctgatgttgttcggtcagttgtgaaaaaaccggtggcaccagatacatccgctgacggctatgcttcactgaggattgcaggacatcgaagaaaccgcgcatggtttgcagcagcacgatgttatgtgaggcttcggcaatcgccagatgaaaacgaacgtccgcttgtgaggcgatatccgggtcttcacttagcgttgcttcaaagcaaagctgaatcttttctttgtcgccaggtgtggcgcgcattgccgcatgccatgcggtgctggcttcaatggcgtagcgggcttccagaatatcgaaactgtaatccggatcatcggccatcagcgtttttagcggctggacgatgttttgctccgaccatgtgtcatgacgccagcgaataaacgtcccgccgccgcgtcgactgagcagcacgccttcgctcaccagttttgccagcgcctcgcgcagtgaattacgtgatacgccgagttgcatcgccagttggcgctcagcgggcaacttcatgcccgcttccaggtttttttcatcaatcagcgcccgcacacgatcggcaacctcgtctgacaggcgtctgggtaaaacaatcattaaggaatcatccacgttaagacataagcctgaagcgtggtgatcacgcccaccatacaggtgaagatcaggctgtgtttgacagtaaagcggaacaaatcagactctttgcccaccaggcctaccgccgcacaggcgatagcgatagattgcggggagatcatcttaccggtgacgccaccggtggtattggcggcaaccagcaacagatcagagacgccaatttgttgtgctgcggtggcttgcagcgcggcgaacagggcgttagatgaggtatccgacccggtcaggaatacccccagccagccgaggaacggcgagaagaaggtgaatgcatgaccggtgtgcgccagtgccagtgccagtgttgatgacagtccggaatagttcgagataaaggcgaacgccagcaccatgccgatggagtagatgggtagagccagttctttcagcgtgctgccgaaggtgctgatagcgtcagacggtttcatcttcagccagacaatcgagagcagtgcagcaaacagaatggcggtgccggtggcagagaaccagtcaaacttaaacacggcggcataggctgtagcctcgctgaccactggtggcatacgggcaaccagtttatcgaggtacggcaccggaatgttgatcacccactcatacagcgcaccacccgatgcgaacagggctttaaacggcgggatactccacagtgttacggtagctgtcaggaacaggaacggtgtccaggcacgtaacacctgacccgcagtgtaaccggtgtgggccagcgtcatatcaacctgtgacgcccccaaatcaccaaaacggaatacgcgcactggctgccagcgtttgaggaacagcgtcaggcagagcagtgataccagcgaagagataatgtccggcagctccggcccaatgaagttagagctaaggtactgagcgatggcaaacgagccgcccgcaaccacgaccgcaggccacgtctccttgataccgcgccagccgtccataatcgccatgatccagaacagcacgataatggtcataaacggtagctgccgccccaccatctggccaatctcaaagctgtcgatgcctgttacttgtccggcaaccaggattggaatgcccatcgcgccaaatgccactggcgcggtgttaacaatcaggcacagtccggcggcgtacagcggtttaaaacccaggccgaccagcaatgcggcggtaattgctaccggtgcgccaaagcctgcggctccttcaaggaaagcgccgaaacagaaaccgacgatcagcatttgcagacgctggtcaggggttatcgaaagaatagacgagcgaatgatgtcaaactgcccggttttcaccgagatcttatagacgaacactgctgcaataatgatccacgcgatgggccacaaaccatagaagaagccataaaccaccgaggccagcgcgttagcgaccggcattttatagaacagcaaagccacggcaagggcgattgctaccgtccatgaggcggcgacgtatcctttcagtttgagcttaatcagcgcaaagaagaaaaacaggatgggaagcgatgctatcagactggaaagccagatattcccggcgggatcgtagttttgttgccagagattcattgcaggtctcctggagtccacgcacatcgtgtaatgagtctgttgctcatctccttgtcacacgttgtgtaaaagtggcactgccaattgtgttgtgtagggataatgacaatgaatggttaactaaatgttatgtattggcaatattgatgtgagttttaattggggaattgtgaaccagaggtcagataagcgaagaattggtagggccaattcttgtggggggagatgtctggtaaagaaaagggcaatcctcatcagagaattgcccttagattgttgacccggagcgccttatcttgcctgatgcgcgtaacgcatcaggcaatttggcgtttgcccttagtcacactaacttaatggatcattaccactgaataccggcaccgagtgcggcggagtattcaccctggctattggtactaccttgtaatttgtagacccaacgaccattggcgctcaccatcgatacacctaaagcaactgccgattcaccgttgtaagtaccgccaccaatagagaccatgctggcacctggagtgtaagcctgcggcagaccggtcattgccattgcagaagcgataccaccgctcaacttgctttcagttttagacagtttgttatccatctcaaccattcgctgatcggtgtattgcttcgtttcctgcacgctttgcttcaactgcgcgtaattcaccgcgtcgttgttgttgacgccagcggagacgttgctgatacgagtcgtaccgccgttgccgccaccgagggtgatattgctatagtcgatagaaccatcagctttggtgtcgtagcgcacgccgcctgcttcagaagatttcagctgcgacacgttaaccgcatcggtggcattaacaccggcagctacgttggtgatacggcgttggttagtagaagaacctacagagattgtattttcttcctctgcaacggaaccggtacccagtgcgacgctgttgtcagcggcagcaatggaaccagaaccaatagcaacgctatctttaccctgcgcgctggcatctacaccatcggtattggtcttgaagtacttggtgctaccggtggtgacgatatcgccaataccgttttcgatattggtgacgcgtgaatcaagattcgttacccgattatccaggttagtaatgctctgggtattctgggaaacctgcgcatccgttactttcaactgacccacgttgaccgcatcggtatcagccgaacctgctgcgacgttagtgatctgacgttgaccatccgcactaccaactgagaattcaccgacagagttctgcggtgcgtccatgttgtaggcggtataattggtttgagcgccacgagtggtcgtagaaccattacctatcgcaatactgttgacatgaatgacttgcgcattgctaccaatggcaatgccgttaagtgcattcgcgtccacgtaggcaccataaccgataccaatacctttatcgccattcacgatggttttcgcacccattgccagcgagtcagttcccactgccagtgaatcttcttccgttgaattagcatggaagtatttggacggtgtcgttgctacagcaccaatcgcattctgcaattgacgaaccgtaacggcgtcatgggcttcggaaccatcggctacgttgatgatttgacgatatttaccgtcatcaccgatagacaatgcaccgagcagttcgccatccgtggtgtcgtaaccaataacaacgccattttccgttatgctggtgtcacgggagcctttggcaatcactcggctggaaacagagctgctacccagggcgatacccgtatcaacgtcgctgtagctgccctgaccaatagctacgctgctatcgcctttggcgacagagttataacctatagctgtagcgccaacaccctgtgcgctggcgtcgttgaacgctaagccgtcgtcgttagtacgcacatagttaatacccgcaccgttttcttggatataggttgcgtcggtgttaccagcgagctgattgataatttgggtgttctgctcaatcatcatattcgtcgcattcaactgagaaccgttcactgcatcggtactgtcctcactaatactgccattagcgacattagtgatgatgctggctttaccgtcatggctggcattgtaggctccagcaccgccattggcagtctcatcccacagcagggcgttatcatcaagcgcatccagggcgtcaccgacgttgttgtactcggcgttcgcaatggtgtaagtcggtgcggtgatggtgccgtcggcgttgacttctgcgtcaccacccagcgcatcagcgatgtacttattggtggtatagagttgtgagccgttaatcgcgtcgctgctggcagcagagattgcaccgttagcgacgttagtgattacactggcagttttatcttttccgtgagcggcgctaaatgcaccattttcaccggcgtccgcatcccagagcagagcgtcgtcaagagtggtatcgatagcattcagggcatcaccgacattatcgtaatcagcattagcaatggtgtacgtcggcgcagtgatggtgccgtctgcattgacttcggcaccaccccccagcgcatcaacaacataactgctcacgccgtggagttgtgagccgtttactgcgtcagaactggagtctgaaatttcaccatctgcgacatcagtgatcacgcttgcgtcaccattagtaccgtgtttggcactgaatttacctgcggtggcatcccaaagcagagcatcgccgagagacgtgctaaatgaggagttaatcgcagccagtgcatcgccgacgttataataatttgtttcaccgattttgtaggttggaccggtaaacacaccgtcagtattcacagaagcattgccgccgaagtaggtggcgatattgctgcttaagtcataaagctggctaccgttaatggcatcggaactggttgcagtgactgtgccgtccaggatattggtgattttgctggcggtattgttgccatgagctgcagtgaagacaccattgtccttatcccatttcagcgcatcctcaccaagattagtcaccgtctcagtcagattagagatgttggtggtgttagtggcgatattggtggtattcgtcgccacggcatcgttggtggttttcagctgagagccgttaacggcatcggtgctgccagtcgtcaggtcgccatctttaacgttggtgattttgctggtggtctcggtgccatgagctgccgtgaatacaccattgtccttatcccatttcagcgcatcctcaccaagattagtcaccgtctcagtcaggttagagatgttggtggtgttagtggcaatattggaagtgttattggcgatattggtggtattcgtcgccacagcatcgttggtggttttcagctgagagccgttaacagcatcagtgctgtcagccgtcaggtcggcatctttaacgttggtgattttgctggtggtatcctggccgtgagctgcactgaatgcctttttagtttcgttccagagcagggcatcagcctgaaggtcaccaacggaatccgtcaggttggtgatattggtggtattggtggcaatatttgccgtattcgtggcaatgttgctggtattagtagcgatattggcggtgttggcttcgacatcgtcattggtagctttcagttgggaaccgttaaccgcatccttactggaggctgaaatcgtgccatccgcaacatcggtgattacgctggcagttgggctactagtaccatgagcagcgctgtatttgcctttggtttggtcccattgcagggtgttttcatcaagtacagcgagcgcagcccctacgttatttttgctaccattttttaaattgtaggttggtgctgtaacagtaccgtcatcaacatctactgcagcccctcctccaagcctttttgctaccgagtcgctaatggcataaagctgtgaaccattaatggcatcgtaactgtcagacttgatcgcgccatttttcacattaacgatcttgcgttttaatgaactattgccgacagagacggtattgtctaaatccgcaatggaatctgcgcccagtgcgacagagttaataccgttggcactgctattactaccaagcgcaagactcttatcaccagttgcattactggctgtgcctaaggcaatggtgtttaagcctctcgactggctaccattacccagagcgatggcatccacgccatcagctttgttgccctggcctatggcgattgcattatctgccagagcctggctgccatttcctaatgcgatagtattgactttatcggcaaggcttccgaaccccattgccatgctattagtcccttttgccttcgcattattgccaatagcagttgcattttcagcggcttcggtctcagcacctatcgcaatagcgttcgctgcgctggcaagtgattgtctgccaaatgcgaggctgtcagtaccgctagctacactgctacgccccagggcaattgcgttttcttcagatgcgacgctacttgctcccagcgccattgaatacgcttttgacgcattggcggtgtcgccaagagcaatactcataatctcagtagctttagtggcatttcccagggcaatggcgtttgctccttccgctttggaagagtcccccatagcaatagacaatttacccaatgcttttgaataacggccgagggccattgagtattggcccaatgaatacgaagaggcacccagtgctatacttctatcgccttctgatattgcactaaccccaaaggccattgatgcaccgccaatcgcatgggtttttgacccgatggcagagctatattggccttcagctatagcgtcataacccacagcagtactggaaccactggtgttcataaaagtatttgctttcgcccctttgcctatagcaacccagccgtcgccagctgatccactaccgtaatcaacaccctgaccgttgtcattcccggcattcgccaatgccccaaacgacgacaacattccacccgcaaccagcgcagaaattaacagcttactgcgcccagatttcttgccacggctttttgccgtttcgctggtaacagtataattccctgtcgcagggttccagataactttaaatattttgttcattaatgatgctcgctattccttgttataagcgtactaactgcatttattttttgcttcttttctgccgattttcagcagagggaagattgtcgaactgaatattttccatgttgatggctaacttcagatatcccaggttattgggcgatacacccttcagggtcaaattaatgtcttgccattgacctggtaataatttcaatgtggatttcattgatgtgttgaaaagtaattgttgccaccgggcaaactctttggcatcgacaggtttttcaccaccccatgtcgcattaaaaccaatatttgagataggtgtacttaataagttgaccagtgaaatatgaataacactgccattctctgtggcgtcaatggataacactcgacccgctaaagccaccgaaccattgttcaggatgaaatacttcgtttttgctgggttaaactcggtaaaaataaaagtgttttgttgatctttaacggatttaattacgtgagttaaagtctttgtactgcttattatgccagtttgttgtttttgaatagtttccagttgactctttagctgtgcttgttg

SEQ ID NO: 249 - DNA, 17766 bp, Escherichia coli
  source 1..17766: mol_type = genomic DNA
attatattctgataatgatttgataagcgaattcttttgccagatggtatttctatttccaccccataatttatatctttttcattaggaagtggcctctttaaataaggcgtgtgtgacatttttttggggttaagcgtctcgtattgaaatacttcgaactgatattcagacatttctgcccatgtttgaattttattgtatcgagagagtgtcgtaaaggctttaacttgcttataacattgtttttggaattcttgctgatatgttaatatgtcattgtatgaaagattggttatcctggcctctaaaaatttaattattgtcgaagcaatttccgcttttgctcgtaaaaagttgtcattaatggttaataatgttgaaaataaaccttcgatttgtttgtcaagatattgtccatctttatataatttgggggtagggtgttctttatgtaaaaaatagtgtcacctaaatttgcgtcagtgaaatttatattaagtagatcttcgaaataaaaccttgacaaggttagaacgaacccggacaggttctgtcctgtcatattgaaatcaataaagttggttccggcaaagactttcatcctgtttttattttcactgtgctcaatatataacttcgtcattttttgatacaggctttgaatatcttttatattagtcggtaagtcagctcgttgttcagcaataaaattagtatctgaaaacatggtttggacactgaatcttactggtattccctcttctacgctaattttagttatgattgccttgtcgggtttaggattagcgacaacaatgattcgacattcagcacttttgttcttttcgtatctaatgttattaatttgattaagtatttcctgtgcctgccgcgtaagtggtgtcgaacttatcgattcaatgttagtaataagacttacaagttgagccacaacttttgagtagtctgcatctgtatatttggtgttcgtgcggcacgcataaatttgtgggaggtgttgccgcgctaaatcatattgttcagggttgtatccttctccagagaatgtggaattaatgggttgttgttcttcccgattatcacaaggccacatcggtgtgtctggtgttttaacattgtcggtatctgttgtgcggttataaatatcgccgtgatatgtatttatcatacctggggtaaagtcaattgacataacattccttattcattatctgttttatgctaagatttttaaattggataattagagcaggaatggattttcttctacgcacaataaatatcatgcgtcatatcttcctgatataattacctttgacttcccttttatctccacccggtaatatttgtgtataaaaaagggcattgatagtgtcgtaaaagaaaacgttaacaactatcaaaaagcgctcattttaaaaagttatgatgttctccgatagtgtgtgaaatgatatttttgtgatgttttagatgtgtaataataaaatgggttaaggtatcttataattatttaataatttgttgtgtaaagcactgataaatcataatccagtacgtctttaaactgctgcactgtatcgctgatcactaagcagatcactgatacaccatgctggacgcgataattggaatctcacgcagggagtaatgtgtaaatagcaaaatcgcctgatgcgctacgcctgtcaggtctacaaataacatacaatttattgaattttcatgactttgtagatcggataagacgcgttagcgtcgcatccgacataaacaaagcgcactttaccaactatcggcagtggatatcgccgctttatttcaaccgcttacccgcttcatcaaccactttctcgccatcttccttggagaacgcgcctttttgcgcatctggcagaatttccagcaccacttccgaggggcggcataggcgagttcccagcggcgtcaccacaatcggacggttaatcagaatcgggtgctgaagcataaagtcgattaaccgctcgtcagtaaatttatcttccgcaaggcccagttcctcatacggctcgacgtttttacgcagcagcgcgcgtacggtaatccccatatcggcaatgagttttaccagttcatcgcgcgttggtggtgtttccagataatggataatggtcggttctgtaccgctgttgcggatcatctccagcgtattacgcgatgtgccgcaggccgggttgtgataaatggtaatgttgctcatatcagtatctcattacaaagtgaaagagagacgaagcgccagcgcgacgagtgtcacaaacagcacaggcagggtcatgataatccctgtacggaagtaatatccccagctgatagtcatattcttctgcgaaagtacgtgcagccagagcagcgttgccaggctaccaatcggggtaattttcggtcccaaatcgcagccaatcacattggcataaaccatcgcttctttgataacgccagatgccgtgctgccatcaatggacaacgcgccaaccagtaccgtcggcatattgttcataatagaagagaggaaggcggtgaggaatccggtgccgagcgtcgcggcccacaggccgttatccgccagcacgttgagtacgccagaaagatattccgttaatccggcattgcgcaggccataaaccaccagatacatgccgagcgagaagatgacaatctgccagggggcaccgcgcaggactttacccgtattaatcgcatgaccgcgtttagcgacgacaaataatatcagcgcgcccatagctgcaatggcgctcaccggcatgccgagcggttccacgacgaaaaatcccaccagcagaagcagtaaaacaacccagccagttttgaacgtagcaggatctttgatcgcttctgcgggagatttcagcagcgccatatcgtagttctgcggaatatctttgcgaaaatagagatgtaacatcaccagcgtggcaacaatcgcggcgatatccaccggcaccatcaccgaggcgtattcgcgaaagccgaggccaaagaaatcagcggaaacgatattcaccaggttggagacaataagcggcaggctggcggtatcggcaatgaatccggccgccatcacgaacgccagcgtagtgcctttactgaaccctaaagccagcagcatggcgatgacaatcggtgtcaaaataagcgccgcgccatcattggcaaacagggcggcaacggcagcaccgagcaggacaatccaggtaaacagcaagcgaccacgaccattaccccagcgtgagacgtgcagcgccgcccattcaaaaaagccggactcatccagcagcaggctgatgataatgacggcgataaacgcagccgtcgcgttccagacgatattccacaccaccggaatatcacccggatggaccacgcccgtaactaacgccagtactgcgccgagcgttgcactccagccgatgcctaaacctttcggctgccagataaccaatacgatggtcaggacaaagatagcgcctgccagtaacataatgcctcccggataaaacacatctgaaaattcatatgtgtttagctaaatttttaactgcaaatgttcttactgtccccggaacagttttgtcgagccaggttgcggacaatcgcctgaaccttttcctgttcacatcgccaggcctcatcaataattttcgccgcccatgctggaatatgcggtgataagcggtaatgaacccacttaccttgcttgcggtccagcaatagcccgctttcacgcagcaatgccaggtggcgggagatcttgggctgcgactggtcgagagcagtgcagagatcgcagacgcataactctcccagttcgctgagcagtaaaacgatgcccagacgggtttcatcagcaagaattttgaacaattggatgggtaacagaaatgacatattgcgctcctgattgttgcaggtagtgtctctcttcgaagcggataagtcaaaaacatatatgacttaacgaatgtgtaagtgcagaggaaggtaataggtgtgaattttgagttggctattcatttgaaaggaggtctgaatcaggacgtaaaaaaaccgactttgcgtcggttttttactttccagccctgagttggtggctctggctggagtgagagagttcttatctaacagctcaatactattagccagtggctaacattgcaagaattagcgatttcttcagctggcggagggggcacttcggtatatatcgcaatgacgatttatatactttcactgggtcatcgtcatattaagccttgtccgaatccggatgtaaaaaaaccgactttgcgtcggttttttactttccagccctgagttggtggcactggctggagtgagaatgccattatctaacgcatcaatgctaataccatactgaaactattgcaaggacatgctggttttataacctgaatgtactgtatgattatccagttagctctgaggcattttcactctggtaatgcgcataaacgctttcaaagtcctggtcagaagtacgggtggtgccgttaactgatgctctggccggagtgagaatgccattatctaacaatagggcatgcgccgtgacaggcagtggatgagtaagcggatgcattctcactccatcgcatggagaaaacgggtgattgataaagcaatcatcgttcttggggcgttaattgcgctgctggaactgatccgctttctgcttcagcttctgaactgatagcggaaacgtaattaagggctaagagcacactactcttagccctttaacatttaacgcattgtcacgaactcttctgccgccgttgggtgaatggcgacggtattgtcgaagtcttttttggttgcacccatcttcagcgccaccgcgaagccctgcaacatttcgtccataccaaagccaatgccgtgaataccgacaatcnnnnnnnnnnatccaacgcacaccagcttcatgcggcacggctggcggtgagtggtgacggcggtatacatcgcggtgaaagaggatttatacactttcacctgatcgtcgccatactgctcgcgcgcctgcggttccgttaaaccaacagtaccaatcggcggatggctgaagaccacggtcggaatgttgctgtaatccagatgctcatccggcttgttattaaacaggcgttcagagagacggcgacccgctgcaactgccaccggtgtcagctccactgcacccgtgttatcgcccaccgcgtaaataccttcaatattggtgttttgatatttatcgacgacgatatagcctttttcgttagttttaacgccagcggcttccaggttgatgttgtcattggcaggctcgcgaccaatcgcccaaatcaggcaatccaccgtttcactgcgaccatcttccagctccagcgtcaggctaccatcggcatttttcactaccgctttcgggatggcgttggtgtgcagctgcgggccttcggcgttcatcacttcgaccagcgtttcggaaatcatcgggtcgaagctgcgcagcggcgcatgtttacgcacaaacagatgcgttttcgcgccgaggccgttaatcacgcccgccagctcaacggcgatgtaacccgcgccaacaaccgccacgcgctctggcaaagcaggaagggcgaagaagccatcagaatcaataccgtattccacgcccggaatatccgggtggctcggacgaccgcctgtggcgatcagaatatgatcggccgtgatggtttcgccgtttacctccagcgttttggcatcaacgaagcgggcaaagcctttgattacatcaacgttatttttaccgagcacgttttcataggaagtatgaatacggtcgatataggcggtacggctggcgatcaacgtttcccagttgaatttattgatagtggtatcaaaaccataatccgggccgtacatatggatcgcttcacggatttgcgccgcgtgccacatcacttttttcggcacacagccaacatttacgcaggtgccgcccagctctttggcttcaatcagcgcacatttctggccgtacatagccgcgcggttgatggaggcgataccgccgctgccgccgccgatggcgatgtaatcatagtgtttagtcatgacaaagtgtccttatcgttgattaccgcgattgtagcgcgagacgtaataggtgccagcaatggctgcaattactccggcacgatccagcttacggtggcgtgcccggtgcctgccggaaccagtttgctgtgcagccacggcagcacgttattcatctgctgttccagtttccacggcgggttaatcacaatcatgccggaagcggtcatgccacggcgatcgctgtctggcagtaccgccagttcaatttgcagaattttgcgaataccggtcgcttccagatcgtggatcatgcgcttaatttgctgacgcagcaccaccggataccacagtgcgtaagtaccagtggcgaaacgtttgtaaccttctgctatcccgctgaccaccgcctgatagtcggttttcatttcatacggcgggtcgataaggattaaaccacggcgggaaaccggcggcagtttggccttaagctgctggaaaccatcggctttttcgacgcgcgcacggctgtctttctgaaattcagaacgcagcaacgggtaatcgctcgggtgcagttcggtcagttgcaggctgtcttgttcgcgcagtagctggcgagcaatcaatggcgaaccggggtagtaacgcaactgaccgctacggttgaagtgttttaccacattgatgtacgcctccagttctgcgggcaaatcgtcctgctgccagatacgggcgatgccttcgagatattcgccggtacgctcggcatgttcgctgcctaactgataacgcccggcccctgcgtgggtgtcgagatagagaaacggtttatctttctctttcagcgactcgatgatcaggctctgaacggtatgtttaaggacgtcggcgtggttgccagcgtgaaagctgtggcgataactgagcatgggtaaaggtgttccggtaagtaaaaatcggcccgtattcggggcgcacaaaagcttatcaggacagtataccgaaaagaggccgccgccgcgaaagcgtaacgtttctcattgaaattcactacacttaaccccatgctacacacattatgtaaagcgcctgttgagcgcttccttaacctctttaaccaggactgcgcgaatgacgaatccgttactgactccctttgaattgcctccgttttctaaaattctcccggaacatgtcgttccagccgtgactaaggcgctgaacgactgccgcgaaaatgtggagcgcgtagtagcgcaaggagcaccgtacacctgggaaaatctctgccagccgttggcggaagtggacgatgtgctggggcgtatattctccccggtcagccacctgaactcggtgaaaaatagcccggaactgcgtgaagcgtacgaacaaaccctgccgctgctgtcggaatacagcacctgggtagggcaacatgaagggctgtataaagcgtatcgcgacctgcgcgatggcgatcattacgccacgctgaacacggctcagaaaaaagcggttgataacgcactgcgcgacttcgaactctctggcatcggtctgccaatagagaaacaacaacgctacggtgagattgccactcgtctttccgagctgggcaaccagtacagcaacaacgtcctcgatgcgacgatgggctggaccaaactcgttaccgacgaagcggagctggcggggatgcctgaaagcgcgctggctgcggcaaaagcccaggccgaagcgaaagagctggaaggctacctgctgacgctggatatcccaagctacctgccggtaatgacctactgcgacaaccaggccttgcgtggagggatgtatcgcgcttacagaaacctcgcttccgatcaaggcccgaacgccggtaagtgggataacagcaaggtgatggaagagatcctcgctctgcgtcacgaactggcgcaactgctgggctttgaaaactacgcctttaaatcccttgctactaaaatggcagaaaacccgcagcaggtgctggatttcttaaccgatctggcaaaacgcgcgcgtccgcaaggcgaaaaagagctggcacaactgcgcgccttcgccaaagcggaatttggcgtcgatgagttgcagccgtgggatatcgcgtactacagcgaaaaacaaaaacagcacctctacagcatcagtgacgaacagctgcgtccgtacttcccggaaaacaaagcggttaacggcctgtttgaagtggtgaaacgtatttacggcatcaccgctaaagagcgtaaagatgttgatgtctggcatccggatgtacgtttcttcgaactgtatgacgaaaataacgaactgcgcggcagcttctacctcgatctgtatgcccgtgaaaacaagcgcggcggggcgtggatggatgactgcgtaggccagatgcgtaaagctgatggttcgctgcaaaaaccggtcgcgtatttgacttgtaacttcaaccgcccggtaaatggtaaaccggcgctgttcactcacgacgaagtgatcaccctgttccacgagttcggtcacggcctgcaccatatgctgacccgcatcgaaaccgctggtgtttccggtatcagcggtgtgccgtgggatgcggtcgaactgccgagtcagtttatggaaaactggtgctgggagccggaggcgctggcgtttatctccggtcactatgaaaccggcgaaccgctgccgaaagagttgctggataaaatgctggcggcgaagaactaccaggcggcgctgtttattctgcgtcagctggagttcggcctgtttgatttccgccttcatgctgagttccgcccggatcagggggcaaaaatcctcgaaactctggcagaaatcaagaaactggttgccgtggtgccatctccgtcctggggccgtttcccgcacgctttcagccatattttcgccggtggttatgcggcaggttactacagctacctgtgggctgacgtactggcggcagatgctttctcgcgctttgaggaagagggcattttcaaccgtgaaaccgggcagtcgttcctcgacaacattctgagccgtggcggttcagaagagccgatggatctgttcaaacgcttccgtggtcgtgaaccgcagctggatgcgatgctggagcattacggcattaagggctgatcattcagtgaaaatctgcttaattgatgaaacaggcgccggagacggcgccttatctgttctggcggcccgctgggggctggagcacgatgaagacaacctgatggcgctggtgttaacgccggaacatctggaattgcgcaagcgtgatgagccaaaacttggcggcatatttgttgattttgttggcggagcgatggcgcaccgacgcaaattcggccgcgaatgcgaattcatcaaggcctcgacctctgatgaccaatccctaccatcgcctcgcactttaatttctccggatacatcgtgacccccgcccaccttccnnnnnnnnnncggtgaggcggtggcgaaagcggtgggcattaaaggcgattatttgccggatgtggtggacgccaccgcagggctggggcgcgatgcctttgtgctggcttcagtcggttgccgcgtgcggatgctggagcgtaatccagtcgttgccgcattgctcgacgacggcctggcgcgtggttatgcggatgcggaaatcggcggctggttgcaggagcgtttgcagttaattcacgcctccagcctgacggcgctaaccgatattaccccacgcccgcaggtggtctatctcgacccgatgttcccgcataagcagaaaagcgcgctggtgaaaaaagagatgcgtgtctttcagtcgctggtggggccggatcttgatgccgatggattgctggagcctgcacgcttgctggcgaccaaacgcgtggtagtaaagcgcccggactacgcgccaccgctagcgaatgtcgccacgccaaacgcggttgtgactaaagggcatcgctttgatatctatgcaggtacgcccgtgtaaaagtaaagcagggtagcgataacgctaccctgctttctgcaagaataattaatggctttccggcgtcgcaatcatgcgtttcagccacggcaccatcaacagcatcactactgcaacgcccagtgtgaccagaccaatcttaccaaacacgttggtatagacgggcaacgtctcaagcggatcggtaatgttgtccggcaccgcggtaaatgttgccacatagccgcccagcaagaacgcggcagcctgcgtcaggaaccacatcccgagaataaagcccatcaaatgctgcggcaccagggcagcaatcatcgccaggccaagggcgctaataaacagttcacctaagctctggaataagtacaccagcacgataaaccatggcgatgtcagcccctgggcatccgcaaaccacattcccgcagctgcagccgtcaaaaagcccagagagcacataaacatgccgagagtaaatttcatcggcatcgagaggtctttgcctttgttacccagatgcgtgtaaatgcctgccagtattgggctggcgagtaccacccagaacgggttaagcgcctggaagctgaccgggttgatggaaaaaccgagaatttcatgatgcacgttgttgatggcaaagaagttcagcgatgttggcatctgggcgtagagaatgtaaaacaccaccgcttcgagcatcaggacaaaggcgacaaacattttattgcgcccggttttatccagcttgaatgcctgacgaaagaagatgatggtgacgacgatggagagaacaatcagcaccagattggcgacttctacgttgtgcatcagccatgcacatacgaagatcatcaccacgctgccaagtaatacgtacaacagtttgctgaagctcatcggcttgaagtcgggttcagaaccaatgtctttcaccattccacgacaggcgatgtaaaccagtaatgcgataattaaccccgccccgcacaggttgtaggtgactgaataaccgaatctatcagcgatcacaggggccagcgataacgctatcaacgagccgatattgatcgacatatagaacagggtgaatgcgccatcaagccgcggatctttcggcggatagcacttcgaaagcaagctggctgggttagctttaaacaggccgttaccgacagcgatagtccccagggcgatgaaaatcaggtcaggcttaagtagcgacatgccggtcatgaagtagccaatcgccagcacaagtgctccgagaacaatggtgcgtttggtccccagcaggtggtcgccgacatagccgccaatggaaatgaggccatagaccagcgcagcaaaagcaccaaaagtgacaaaagcctgctcttgcgagaatccaagctgtttaacgaagaaaaccgccagtacgccctgcacgccgtagtagccgaatcgctcccataactcgacaaaaaagatcatgaaaaatgggcgaggttgctgcagcatccccatgggtgttgttgtattcatatttattaaccttccaataccatcctgaaaagtatgaacgcgtaagggataacgcgcgaaaaagtttacatctgtcagagattcttaatattgatgcggtgaatagattaatacactattacaacagaaaataaccagctgatcacactaatgatggaaaatatgatggtgttaaatgttgtattggcaggagattttgattgcgtacgcagatcgtaggccagataaggggtttacgctgcatcaggtaacaaggcgcgccaaaaagcaaaacgcccgcatatgcgggcgttcaggaacacgtcgtggggggatgattattcttcttcgtcgcgcagcggaacaatcagcatatcaacgtgaacggtgttgatcagctgacgtgcggaagacattagtttgctccagaagtcctggtggtgaccacaaaccaccagatccatatcgtatttcttgattgcatcgaccagaacctggcccaggtcgccgctgccgctcagggtttcagtgattgggtagcctgcattagtggaaagctcggtcagcgcatgatgtgtctcttcagagatgcgtttctgcatatcacccagattcacatcaataagcccggtgtataggtcagagtagtttacatctacgtggatcagagaaactttcgcattgtaggggcgagccatagagactgctttctctaccagaactttgctttccggggagaggtcgaccgcgatgagaatgtgtttataagccatagtgttactccttccataaagttgtcgatgactggccagctagcgtttcttgtgccgttacgtcacccgcgtcctgcgaactacgtgcgcggggctaacccagccgtaaagattcagtgttaagaccatccttaccttatagcgacccggatgatccgtcaatccgccttgcttactcgttagataaacaaattttcgacatgaatatattgatagtggttaaccttctggaaaaaaaacaacctgatctcctacactatctatagagccgctcggatgttggtcaccacaaaagcggtttctccaggacctggtgttaactgattggcagcgtatcgggagcggtagccccggggtggaactccgcgggcaggtcgccggggaggaggtatgataagcaccgtcgcattattttgggctttatgtgtcgtttgcattgttaacatggcgcgctatttctcatcactacgcgcgttgttagtggtactgcgtaactgcgatccattgctctatcaatatgttgatggagggggcttttttacctcacatggccaacccaacaaacaggtgcgtctcgtttggtatatctatgcccaacgttatcgcgatcatcacgatgatgagtttattcgccgctgtgagcgggtgcgtcggcagtttattctgactagcgcattgtgtggtctggtggtggtcagcctgattgcattgatgatttggcattaagcacttcagcaataataacgcataaaaaaagcgggccagtaaactgacccgctcgttttggtgcgtacgattacaggaactgcaaggagagccagtacagcccgccggaaagcagtaccgcagccggaagggtaaacacccaggccatcagaatactggttacggttttacgctgtaagccgccgccatctaccaccatcgtccccgcgacagaagaggagagtacgtgagtagtggaaaccggcatcccggtataactcgccaggccgatagacactgccgccgtcatctgggcagacatcccctgagcgtaggtcatgcctttcttaccgattttctcaccgatagtcgttgccacacggcgccagccaatcatcgtaccgatacctaacgccagcgcgaccgccatgatgatccacaccggtgcatactcgatggtgctaagcatgtcggacttcagtttcttcaacaggcgctgatcgtcagcactcacgccaggcatcttcaccactttgtcgatagtgtcagaaacgcacagcataatgcggcgcatctggctacgttgatcaagcgacagcttgtcgtagctttccacatcggtggtcaacatacctttcaggcggttgagcgcgttaatggtattcgacggatggcagtggaactccgcaggttgcgttgcgccagcttccggagccggtactaactgatcagcaccggtagcctgtttgagcagcgcaggatgctgctcaaagtaagcttcgacgttgttgatggcatcacgggtacgggtgatttcgtagccagtggcattcatgttcaccacgaagcctgctggcgcgacgccaatcaataccaacataaccagaccaatgcctttctgaccatcgttcgcgccgtgcgaaaacgccacgccgatagcggaaaggatcagcgcgatacgcgtccagaacggcggctttttcttgccgtctttcttttcacgctccgctggggtcaggtggatacgggcgcgtttcttggtgccgctccagtagcgacgcagcaagaaaatcagaccgccagcaaacaccaggccgacaataggggaaacgatcagagaaccgaaaatacttaatactttcgggatattgagtgcatccaccactgacgtcccggtcatcaacgcattggttaaaccaatcccgatgatcgcgccaatcagcgtatgagagctggatgcaggtaaaccaaagtaccaggtacccaggttccagataatcgccgccagcaacatagagaacaccatggcaaggccatgagacgatcccatattaagcagcagatccgtcggcagcatatgcacaatggcataggcaacactcagaccacccagcaaaacacccaaaaagttgaacaccgccgccataaccacggcgagctgagaacgcatcgcgcgggtatagataacggttgccacggcgttggctgtgtcatggaaaccattgatggcttcgtagaacagcacaaaagccagtgcaagcaataataacagcccggtatgcaaatccaggccagcaaacaaatgtagcataggacgttacgccattttgaggacatgaacgcggcgcattatcagtgactttcgcggcgcgggcaaagtgaaatatagactttttttgatttgcctcctgtatggatttcactcaaaaaataattatcttatataattcaggcaaatacttccttttagtaatattgatgctggtgcgaccactgaggaatctttacaattcacgcccgttttttctaagaggagcgcaacgtggaaaggtttgatgccattattataggcgctggtgcggcgggtatgttctgttctgcgctggcaggtcaggcaggacgccgggttctgctgatcgataatggtaaaaaaccagggcgcaaaatccttatgtctggcggtgggcgctgcaactttaccaacctttatgtcgaaccaggcgcttatctgagccagaatccgcatttttgtaagtctgcactcgcgcgttttacccagtgggatttcattgatctggtcaataaacacggcatcgcctggcacgagaaaacgttaggacaactcttctgcgatgactccgcgcagcagattgtcgacatgctggtggatgagtgcgagaagggcaatgtaaccttcagattgcgtagcgaagtgctgagtgtggcgaaggatgaaacaggcttcacgcttgaactgaacggcatgactgtcggttgcgaaaagctggtcatcgcgaccggtgggctgtcaatgccggggctgggcgcgtcgccgtttggttataagattgccgaacaatttggcctcaacgtgctgccgacccgcgcgggtctggtgccattcactctgcataaaccgttgctcgaagagttacaggtgctggcgggcgtggcggtgccttccgtgattaccgctgaaaacggcatcgttttccgtgagaacttactcttcacccatcgcggcttgtctggaccggcggtgttgcagatttccagctactggcaaccgggtgaatttgtcagtatcaatctgctaccggatgtggatctcgaaaccttcctgaatgagcagcgtaacgcacatccgaatcagagcctgaaaaacacactggcggttcatctaccgaagcggttggttgaacgcttacagcaactcgggcaaatcccggatgtttcgctaaaacagctcaacgtgcgtgaccaacaggcactgattagcacattgaccgactggcgcgtacaacccaacggcactgaaggctatcgcactgccgaagtgacgctcggcggcgtggacaccaacgaactctcttcacggacgatggaagcgcgcaaagtgcctgggctgtacttcatcggcgaagtgatggacgttaccggctggctggggggctataacttccagtgggcgtggtcgagtgcgtgggcttgtgcgcaggatttgattgcagcaaagtcgtcctgacctatttcctaaagatgaaaattattagagtcgcattaaaaatgagctaattttgatagtggttatcttgtgattattttctaatgagcccgtgaactgaaaccctccatgcttaatataaggtggatggaaaggtgattgaaaactcacccagtggccagatctttatgaaatatgaacaggttgaaaaaaacagtaactttgctgttttttatacttaaccactatgcattaatgctgcgttatttcatgatgcctaagaaaaaccagcgttacgcaaatggtcaacgctggttttatccggtacgttgcaattattttttagcagaacccgcttctaatattgaaacgattgagaacaacgtaaagcataccgctcccaaaccgaccagaactcgcgaaggaataaaatatcccatgtcggtctgcgccatttccgcaagaaacgatgccaggaaaaggcaaaacaggcaggtgaagacgggaatcatcggtattctgttggctaacgaacaggtacgtctccataccagtgccagtagccagacttttgagaatatgctgtaacagatcattccgaggcaaataagaataatgccgggagccagtcgggcgcttgcatcggaactgactaagacgtatatcccctgcagtaccgtgattgagccgagaaaaataacccaataacaccacagccagtgttctttagttgaaaacgtattacgtgtttgatggacaattgtggcaacaaggccaattagacaggcacagattgcggttaacccaagcaatacgtgacccgcgacataatgcggagttatgtcagcactacgtaacagcgtaatagaccaaatgaaaccgagcagggtgagtaaaacgggaacggcaatgaggcaattaccgattaatgaagaataagcctgtaccggcgttccatcgctcttgctccccgctgcatttttgggaatgagcagaaagtgaccggatgacgctgccaccgtcgatacacaggcggcaatcataccaacgccgaaaataacatggccggcgacaaactcgtctgccatcacatcattgcctgctaacagtgcccaaccccatatcatggtgataattgaccccgcatagccaataatggggaacaatgtattgtaaaacgtattaacgccgcgcgtgagctgcgaaatgataataaatgcggtagtgaataatgccaggcatatggccgccagagaaatcagcacatgacccgcgacgaaatactcgctttgccctgaactttccagcacaaagccacctaacgcgatgcaaattaatcccataatcaaagggattaatttgaaaagccacccgatatatatgttcactttaaactcctcaggtatccctgctaataatgaaatgtgcattaatgataatttcagcctgttaatataacgacgagatatcattaaagacaaatgcatagcataactatagcggggtttactgtgccgagtgccattttttaccggttaaaaggccatgataaataaata

SEQ ID NO: 250 - DNA, 17618 bp, Escherichia coli
  source 1..17618: mol_type = genomic DNA
atatatgaatgtccgatagtggattttatttttacaattttttgtgtttaggcatataaaaattaacccgccatttgaacggcgggttaaaatatttacaacttagcaatcaaccattaacgcttgatatcgcttttaaagtcgcgtttttcatatcctgtatacagctgacgcggacgggcaatcttcataccgtcactgtgcatttcgctccagtgggcgatccagccaacggtacgtgccattgcgaaaatgacggtgaacatggcagacggaatacccatcgctttcaggatgataccagagtagaaatcgacgttcgggtacagtttcttctcgataaagtacgggtcgttcagcgcgatgttttccagctccatagccacttccagcaggtcatctttggtgcccagctctttcagaacttcatggcaggtttcacgcattacggtggcgcgcgggtcgtaatttttgtacacgcggtgaccgaagcccatcaggcggaaagaatcatttttatctttcgcacgacgaacaaattccggaatgtgtttaacggagctaatttcttccagcattttcagcgccgcttcgttagcaccaccgtgcgcaggtccccacagtgaagcaatacctgctgcgatacaggcaaacgggttcgcacccgaagagccagcggtacgcacggtggaggtagaggcgttctgttcatggtcagcgtgcaggatcagaatacggtccatagcacgttccagaatcggattaacttcatacggttcgcacggcgtggagaacatcatattcaggaagttaccggcataggagagatcgttgcgcggataaacaaatggctgaccaatggaatacttgtaacacatcgcggccatggtcggcattttcgacagcaggcggaacgcggcaatttcacgatgacgaggattgtttacatccagcgagtcgtgatagaacgccgccagcgcgccggtaataccacacatgactgccattggatgtgagtcgcgacggaaagcgtggaacagacgggtaatctgctcgtggatcatggtatgacgggtcaccgtagttttaaattcgtcatactgttcctgagtcggtttttcaccattcagcaggatgtaacaaacttccaggtagttagaatcggtcgccagctgatcgatcgggaaaccgcggtgcagcaaaataccttcatcaccatcaataaaagtaattttagattcgcaggatgcggttgaagtgaagcctgggtcaaaggtgaacacaccttttgaaccgagagtacggatatcaataacatcttgacccagcgtgcctttcagcacatccagttcaacagctgtgtccccgttgagggtgagttttgcttttgtatcagccatttaaggtctccttagcgccttattacgtaagactgccggaacttaaatttgccttcgcacatcaacctggctttacccgtttgttatttggctcgccgctctgtgaaagaggggaaaacctgggtacagagctctgggcgcttgcaggtaaaggatccattgatgacgaataaatggcgaatcaagtacttagcaatccgaattattaaacttgtctaccactaataactgtcccgaatgaattggtcaatacttccacactgttacataagttaatcttaggtgaaataccgacttcataacttttacgcattatatgcttttcctggtaatgtttgtaacaactttgttgaatgattgtcaaattagatgattaaaaattaaataaatgttgttatcgtgacctggatcactgttcaggataaaacccgacaaactatatgtaggttaattgtaatgattttgtgaacagcctatactgccgccaggtctccggaacaccctgcaatcccgagccacccagcgttgtaacgtgtcgttttcgcatctggaagcagtgttttgcatgacgcgcagttatagaaaggacgctgtctgacccgcaagcagaccggaggaaggaaatcccgacgtctccaggtaacagaaagttaacctctgtgcccgtagtccccagggaataataagaacagcatgtgggcgttattcatgataagaaatgtgaaaaaacaaagacctgttaatctggacctacagaccatccggttccccatcacggcgatagcgtccattctccatcgcgtttccggtgtgatcacctttgttgcagtgggcatcctgctgtggcttctgggtaccagcctctcttcccctgaaggtttcgagcaagcttccgcgattatgggcagcttcttcgtcaaatttatcatgtggggcatccttaccgctctggcgtatcacgtcgtcgtaggtattcgccacatgatgatggattttggctatctggaagaaacattcgaagcgggtaaacgctccgccaaaatctcctttgttattactgtcgtgctttcacttctcgcaggagtcctcgtatggtaagcaacgcctccgcattaggacgcaatggcgtacatgatttcatcctcgttcgcgctaccgctatcgtcctgacgctctacatcatttatatggtcggttttttcgctaccagtggcgagctgacatatgaagtctggatcggtttcttcgcctctgcgttcaccaaagtgttcaccctgctggcgctgttttctatcttgatccatgcctggatcggcatgtggcaggtgttgaccgactacgttaaaccgctggccttgcgcctgatgctgcaactggtgattgtcgttgctctggtggtttacgtgatttatggattcgttgtggtgtggggtgtgtgatgaaattgccagtcagagaatttgatgcagttgtgattggtgccggtggcgcaggtatgcgcgcggcgctgcaaatttcccagagcggtcaaacctgtgcgctgctctctaaagtcttcccgacccgttcccataccgtttctgcgcaaggcggcattaccgttgcgctgggtaatacccatgaagataactgggaatggcatatgtacgacaccgtaaaaggttcggactatatcggtgaccaggacgcgattgaatatatgtgtaaaaccgggccggaagcgattctggaactcgaacacatgggcctgccgttctcgcgtcttgatgatggtcgtatctatcaacgtccgtttggcggtcagtcgaaaaacttcggcggcgagcaggcggcacgcactgcggcagcagctgaccgtaccggtcacgcactgttgcataccctttatcagcagaacctgaaaaaccacaccactattttctccgagtggtatgcgctggatctggtgaaaaaccaggatggcgcggtggtgggttgtactgcactgtgcatcgaaactggtgaagtggtttatttcaaagcccgcgctaccgtgctggcgactggcggggcagggcgtatttatcagtccaccactaacgcccacattaacactggcgacggcgtcggcatggctatccgcgcaggcgtaccggtgcaggatatggaaatgtggcagttccacccgaccggtattgccggtgcgggcgtactggtcaccgaaggttgccgtggtgaaggcggttatctgctgaacaaacatggcgaacgctttatggagcgttatgcgccgaacgccaaagacctggcgggccgtgatgtggtggcgcgttccatcatgatcgaaatccgtgaaggtcgcggctgtgatggtccgtgggggccacacgcgaaactgaaactcgaccacctgggtaaagaagttctcgaatcccgcctgccgggtatcctggaactctcccgtaccttcgctcacgttgatccggtgaaagagccgattccggttatcccaacctgtcactacatgatgggcggtattccgaccaaagtgaccggtcaggcgctgacggtgaacgagaaaggcgaagatgtggttgttccgggactgtttgccgttggtgaaatcgcttgtgtatcggtacacggcgctaaccgtctgggcggcaactcgctgctggacctggtggtctttggtcgtgcagcgggtctgcatctgcaagagtctatcgccgaacagggcgcattgcgcgatgccagcgagtctgatgttgaagcatctctggatcgtctgaaccgctggaacaataatcgtaacggtgaagatccggtggcgattcgtaaagcgctgcaagaatgtatgcagcataacttctcggtcttccgtgaaggtgatgcgatggcgaaagggcttgagcagttgaaagtgatccgcgagcgtctgaaaaatgcccgtctggatgacacttccagcgagttcaacacccagcgcgttgagtgcctggaactggataacctgatggaaacggcgtatgcaacggctgtttctgccaacttccgtaccgaaagccgtggcgcacatagccgcttcgacttcccggatcgtgatgatgaaaactggctgtgccactccctgtatctgccagagtcggaatccatgacgcgccgaagcgtcaacatggaaccgaaactgcgcccggcattcccgccgaagattcgtacttactaatgcggagacaggaaaatgagactcgagttttcaatttatcgctataacccggatgttgatgatgctccgcgtatgcaggattacaccctggaagcggaagaaggtcgcgacatgatgctgctggatgcgcttatccagctgaaagagaaagatcccagcctgtcgttccgccgctcctgccgtgaaggtgtgtgcggttccgacggtctgaacatgaacggcaagaatggtctggcctgtattaccccgatttcggcactcaaccagccgggcaagaagattgtgattcgcccgctgccaggtttaccggtgatccgcgatttggtggtagacatgggacaattctatgcgcaatatgagaaaattaagccttacctgttgaataatggacaaaatccgccagctcgcgagcatttacagatgccagagcagcgcgaaaaactcgacgggctgtatgaatgtattctctgcgcatgttgttcaacctcttgtccgtctttctggtggaatcccgataagtttatcggcccggcaggcttgttagcggcatatcgtttcctgatcgatagccgtgataccgagactgacagccgcctcgacggtttgagcgatgcattcagcgtattccgctgtcacagcatcatgaactgcgtcagtgtatgtccgaaggggctgaacccgacgcgcgccatcggccatattaagtcgatgttgttgcaacgtaatgcgtaaaccgtaggcctgataagacgcgcaagcgtcgcatcaggcaaccagtgccggatgcggcgtgaacgccttatccggcctacaagtcattacccgtaggcctgataagcgcagcgcatcaggcgtaacaaagaaatgcaggaaatctttaaaaactgcccctgacactaagacagtttttaaaggttccttcgcgagccactacatagacaagagctcgcaagtgaaccccggcacgcacatcactgtgcgtggtagtatccacggcgaagtaagcataaaaaagatgcttaagggatcacgatgcagaacagcgctttgaaagcctggttggactcttcttacctctctggcgcaaaccagagctggatagaacagctctatgaagacttcttaaccgatcctgactcggttgacgctaactggcgttcgacgttccagcagttacctggtacgggagtcaaaccggatcaattccactctcaaacgcgtgaatatttccgccgcctggcgaaagacgcttcacgttactcttcaacgatctccgaccctgacaccaatgtgaagcaggttaaagtcctgcagctcattaacgcataccgcttccgtggtcaccagcatgcgaatctcgatccgctgggactgtggcagcaagataaagtggccgatctggatccgtctttccacgatctgaccgaagcagacttccaggagaccttcaacgtcggttcatttgccagcggcaaagaaaccatgaaactcggcgagctgctggaagccctcaagcaaacctactgtggcccgattggtgccgagtatatgcacattaccagcaccgaagaaaaacgctggatccaacagcgtatcgagtctggtcgcgcgactttcaatagcgaagagaaaaaacgcttcttaagcgaactgaccgccgctgaaggccttgaacgttacctcggcgcaaaattccctggcgcaaaacgcttctcgctggaaggcggtgacgcgttaatcccgatgcttaaagagatgatccgacacgctggcaacagcggcacccgcgaagtggttctcgggatggcgcaccgtggtcgtctgaacgtgctggtgaacgtgctgggtaaaaaaccgcaagacttgttcgacgagttcgccggtaaacataaagaacacctcggcacgggtgacgtgaaataccacatgggcttctcgtctgacttccagaccgatggcggcctggtgcacctggcgctggcgtttaacccgtctcaccttgagattgtaagcccggtagttatcggttctgttcgtgcccgtctggacagacttgatgagccgagcagcaacaaagtgctgccaatcaccatccacggtgacgccgcagtgaccgggcagggtgtggttcaggaaactctgaacatgtcgaaagcgcgtggttatgaagttggcggtacggtacgtatcgttatcaacaaccaggttggtttcaccacctctaatccgctggatgctcgttctacaccgtactgtactgatatcggtaagatggttcaggcaccgattttccacgttaacgcggatgatccggaagccgttgcctttgtgacccgtctggcgctcgatttccgtaacacctttaaacgtgatgtcttcatcgacctggtgtgctaccgccgtcacggccacaacgaagccgacgagccgagcgcaacccagccgctgatgtatcagaaaatcaaaaaacatccgacgccgcgcaaaatctatgctgacaagctggagcaggaaaaagtggcgacgctggaagatgccaccgagatggttaacctgtaccgcgatgcgctggatgctggcgattgcgtagtggcagagtggcgtccgatgaacatgcactctttcaccnnnnnnnnnntatctcaaccacgaatgggacgaagagtacccgaacaaagttgagatgaagcgcctgcaggagctggcgaaacgcatcagcacggtgccggaagcagttgaaatgcagtctcgcgttgccaagatttatggcgatcgccaggcgatggctgccggtgagaaactgttcgactggggcggtgcggaaaacctcgcttacgccacgctggttgacgaaggcattccggttcgcctgtcgggtgaagactccggtcgcggtaccttcttccaccgccacgcggtgatccacaaccagtctaacggttccacttacacgccgttgcaacacatccataacgggcagggcgcgttccgcgtctgggactccgtactgtctgaagaagcagtgctggcgtttgaatacggttatgccaccgcagaaccacgcactctgaccatctgggaagcgcagttcggtgacttcgccaacggtgcgcaggtggttatcgaccagttcatctcctctggcgagcagaaatggggccggatgtgtggtctggtgatgttgctgccgcacggttacgaagggcaggggccggagcactcctccgcgcgtctggaacgttatctgcaactttgtgctgagcaaaacatgcaggtgtgcgtaccgtctaccccggcacaggtttaccacatgctgcgtcgtcaggcgctgcgcgggatgcgtcgtccgctggtcgtgatgtcgccgaaatccctgctgcgtcatccgctggcggtttccagcctcgaagaactggcgaacggcaccttcctgccagccatcggtgaaatcgacgagcttgatccgaagggcgtgaagcgcgtagtgatgtgttctggtaaggtttattacgacctgctggaacnnnnnnnnnnaagaacaatcaacacgatgtcgccattgtgcgtatcgagcaactctacccgttcccgcataaagcgatgcaggaagtgttgcaacagtttgctcacgtcaaggattttgtctggtgccaggaagagccgctcaaccagggcgcatggtactgcagccagcatcatttccgtgaagtgattccgtttggggcttctctgcgttatgcaggccgcccggcctccgcctctccggcggtagggtatatgtccgttcaccagaaacagcaacaagatctggttaatgacgcgctgaacgtcgaataaataaaggatacacaatgagtagcgtagatattctggtccctgacctgcctgaatccgtagccgatgccaccgtcgcaacctggcataaaaaacccggcgacgcagtcgtacgtgatgaagtgctggtagaaatcgaaactgacaaagtggtactggaagtaccgggatcggcagacggcattatggatgcggttctggaagatgaaggtacaacggtaacgtctcgtcagatccttggtcgcctgcgtgaaggcaacagcgccggtaaagaaaccagcgccaaatctgaagagaaagcgtccactccggcgcaacgccagcaggcatctctggaagagcaaaacaacgatgcgttaagcccggcgatccgtcgcctgctggctgaacacaatctcgacgccagcgccattaaaggcaccggtgtgggtggtcgtctgactcgtgaagatgtggaaaaacatctggcgaaagccccggcgaaagagtctgctccggcagcggctgctccggcggcgcaaccggctctggctgcacgtagtgaaaaacgtgtcccgatgactcgcctgcgtaagcgtgtggcagagcgtctgctggaagcgaaaaactccaccgccatgctgaccacgttcaacgaagtcaacatgaagccgattatggatctgcgtaagcagtacggtgaagcgtttgaaaaacgccacggcatccgtctgggctttatgtccttctacgtgaaagcggtggttgaagccctgaaacgttacccggaagtgaacgcgtctatcgacggcgatgacgtggtttaccacaactatttcgacgtcagcatggcggtttctacgccgcgcggcctggtgacaccggtactgcgtgatgtcgataccctcggcatggcagacatcgagaagaaaatcaaagagctggcagtcaaaggccgtgacggcaagctgaccgttgaagatctgaccggtggtaacttcaccatcaccaacggtggtgtgttcggttccctgatgtctacgccgatcatcaacccgccgcagagcgcaattctgggtatgcacgctatcaaagatcgtccgatggcggtgaatggtcaggttgagatcctgccgatgatgtacctggcgctgtcctacgatcaccgtctgatcgatggtcgcgaatccgtgggcttcctggtaacgatcaaagagttgctggaagatccgacgcgtctgctgctggacgtgtagtagtttaagcttcacctgcactgtagaccgacgtggatagggtgtcggtctacggtttaaaagataacgattactgaaggatggacagaacacatgaacttacatgaatatcaggcaaaacaactttttgcccgctatggcttaccagcaccggtgggttatgcctgtactactccgcgcgaagcagaagaagccgcttcaaaaatcggtgccggcccgtgggtagtgaaatgtcaggttcacgctggtggccgcggtaaagcgggcggtgtgaaagttgtaaacagcaaagaagacatccgtgcttttgcagaaaactggctcggcaagcgtctggtaacgtatcaaacagatgccaatggccaaccggttaaccagattctggttgaagcagcgaccgatatcgctaaagagctgtatctcggtgccgttgtagaccgtagttcccgtcgtgtggtctttatggcctccaccgaaggcggcgtggaaatcgaaaaagtggcggaagaaactccgcacctgatccacaaagttgcgcttgatccgctgactggcccgatgccgtatcagggacgcgagctggcgttcaaactgggtctggaaggtaaactggttcagcagttcaccaaaatcttcatgggcctggcgaccattttcctggagcgcgacctggcgttgatcgaaatcaacccgctggtcatcaccaaacagggcgatctgatttgcctcgacggcaaactgggcgctgacggcaacgcactgttccgccagcctgatctgcgcgaaatgcgtgaccagtcgcaggaagatccgcgtgaagcacaggctgcacagtgggaactgaactacgttgcgctggacggtaacatcggttgtatggttaacggcgcaggtctggcgatgggtacgatggacatcgttaaactgcacggcggcgaaccggctaacttccttgacgttggcggcggcgcaaccaaagaacgtgtaaccgaagcgttcaaaatcatcctctctgacgacaaagtgaaagccgttctggttaacatcttcggcggtatcgttcgttgcgacctgatcgctgacggtatcatcggcgcggtagcagaagtgggtgttaacgtaccggtcgtggtacgtctggaaggtaacaacgccgaactcggcgcgaagaaactggctgacagcggcctgaatattattgcagcaaaaggtctgacggatgcagctcagcaggttgttgccgcagtggaggggaaataatgtccattttaattgataaaaacaccaaggttatctgccagggctttactggtagccaggggactttccactcagaacaggccattgcatacggcactaaaatggttggcggcgtaaccccaggtaaaggcggtactacccacctcggcctgccggtgttcaacaccgtgcgtgaagctgttgctgctactggcgctaccgcttctgttatctacgtaccagcaccgttctgcaaagactccattctggaagctattgatgcaggcatcaaactgattatcaccatcactgaaggcatcccgacgctggatatgctgactgtgaaagtgaaactggacgaagccggcgttcgtatgatcggcccgaactgcccgggcgttatcactccgggtgaatgcaaaatcggtatccagccgggtcacattcacaaaccgggtaaagtgggtatcgtttcccgttccggtacactgacctatgaagcggttaaacagaccacggattacggtttcggtcagtcgacctgtgttggtatcggcggtgacccgatccctggctctaactttatcgacattctcgaaatgttcgaaaaagatccgcagaccgaagcgatcgtaatgatcggtgagatcggcggtagcgctgaagaagaagcggcagcgtacatcaaagagcatgttaccaagccagttgtgggttacatcgctggtgtgactgcgccgaaaggcaaacgtatgggccacgcgggtgccatcattgccggtgggaaagggactgcggatgagaaattcgctgctctggaagccgcaggcgtgaaaaccgttcgcagcctggcggatatcggtgaagcactgaaaactgttctgaaataaatatctgtaataagaaatagccctcgccgcttccctctacaggaatggcgaagggctgtcggtttcgacatggttggccatcgtatgatggccttttttgtgcttatcgcgatgattttcgttgcgctatcagggtaaatttatagtcatcggtattaaaagcgttgcggctatattcaaacacccgaccatcaactaaatatccacgcgatactttttcaagaatcggctttgtctggctgatattaagcagacggctcatctcttcggttggcatcagaggaatgatttcctgttcgctacgatcgataaccattttcttcacttcttcaataaagtgatattttgaattttccatgacctgccaggtgagatccgggaacaacgcaagcggcatccaggtttcttccagcgccattggcttttgcttgcgatagcgcacgcgcttcacatgccacacacgatcctgcgcggtgatttgtagctgttgctgaagaaaatcgtcagccggaatcacttcaaatatcaggacttcactgtgtgtatcgacgtgacggtccgacagtttttcatcaaaactggttaactgaaaaatatcgtaattgacacgctcttctttgacgtaagtcccgctgccctgaatgctttcgaggatctgttgctcgactaactggcgcaaagcctgacgcaccgtaacccggctgacgccaaactctgtttgtaatgccgattcggtaggtaacgcatcgccaggtttaagctcgccacgcgcaatttgttcacgaatgcgatcggcaatctgccggtataagggcttgtgtcccatttttagtatctcattaatacgaatttagccattatgcccgataaattcatcctgtaaataatacaaatacaatacaaataatttcaatcaagtgaaattgatcacataatggtattgttttatcgggcacactggcgcgactataaaaacgatcaagtgaggatcatgatgaatctgacgactctgacccaccgcgatgcgttgtgtctgaatgcgcgctttaccagccgtgaagaggccatccacgcgttgactcaacgtcttgctgctctggggaaaatttccagtactgagcaatttctggaagaagtgtatcgccgtgaaagccttggcccgaccgccttaggtgaagggttggctgtgccgcatggcaaaactgctgcggtaaaagaagcggcgtttgcggtcgccacactcagcgagccgcttcagtgggaaggcgttgatggcccggaagcggttgatttagtggtgctgctggcgattccccccaatgaagcgggtactacgcatatgcaactgctgacagcgctgaccacgcgcctggcggatgatgagattcgggcgcgtatacagtcggcgacgacgcctgatgagttgctctcggcgctggatgacaagggaggcacgcaaccttctgcctctttttccaacgcgccaactatcgtctgcgtaacggcctgtccggcgggtattgctcacacctatatggctgcggaatatctggaaaaagccggacgcaaactcggcgtaaatgtttacgttgaaaaacaaggcgctaacggcattgaagggcgtttaacggcggatcaactcaatagtgcaaccgcctgtatttttgcggctgaagtcgccatcaaggagagtgagcgttttaatggcattcccgcgctttcagtgcctgttgccgagccgattcgccatgcagaagcgttgatccaacaagcgcttaccctcaagcgtagcgatgagacgcgtaccgtacagcaagatacgcaaccggtgaaaagtgtcaaaacggagctgaaacaggcactgttgagcggaatctcttttgccgtaccgttgattgtcgcggggggcacggtgctggcggtcgcggtattactgtcgcaaatcttcgggctacaagatctgtttaatgaagaaaactcctggctgtggatgtaccgcaagctgggcggcgggctgctcggaattttgatggtaccggtgctcgcggcctataccgcctattctctggcagataaaccggcgttagcgccaggctttgcggctggacttgccgccaacatgatcggctccgggtttctcggcgcggtcgttggcggattgatagccggttacttgatgcgctgggtgaaaaatcacttgcgtcttagcagtaaattcaatggattcctgactttttatctctacccggtgctcggtacgttgggagcgggcagtctgatgctgtttgtggtgggagaacctgtcgcctggatcaataactcgcttaccgcctggctgaacggtctgtcaggaagtaacgcgctgttgctgggtgccattctcggttttatgtgttcctttgaccttggagggccagtgaacaaagccgcttatgcattctgcctgggcgcaatggcgaacggcgtttacggcccgtatgccattttcgcctccgtcaaaatggtttcggcatttaccgtaaccgcttccacgatgctcgcaccgcgcctgtttaaagagtttgaaattgagaccgggaaatccacctggctgttagggctggcaggtattaccgaaggggcgatcccgatggcgattgaagatccgctgcgggttattggttcgtttgtgctgggctctatggtaacgggcgctattgtcggtgcgatgaatatcggcctttcgacacccggtgccggcattttctcgctctttttacttcatgataatggcgcgggcggtgttatggcggcaattggctggtttggtgcggcattggtgggggctgcaatctcgactgcaattctcctgatctggcggcgtcacgcggttaagcatggcaactatctgactgatggcgtaatgccataaacaaaaaggaaacgacgatgaaagcggtatctcgcgttcacatcaccccgcatatgcattgggatcgggagtggtatttcaccaccgaagagtcacgcattctgctggtcaataatatggaagagatcctgtgccgactggaacaggacaacgaatacaaatattacgtactcgacgggcaaacggcgatcctcgaagattatttcgcggtgaaaccggaaaacaaagaccgcgtgaagaaacaggtagaagccggtaagttgattatcggcccctggtatacccagaccgataccacgattgtttctgcggaatccatcgtccgtaatctgatgtacggaatgcgtgactgcctcgcgtttggcgagccgatgaaaataggttatttaccggattcctttggcatgtccgggcaactgccgcatatctacaatggatttggcattacccgcactatgttctggcgcggatgttcggagcgccacggtactgataaaaccgagtttttatggcaaagcagtgacggtagcgaagtgacggcgcaggtgctgccgttgggttatgccatcggtaagtacttacctgccgacgaaaacggattacgcaaacgcctcgacagttattttgacgtgctggaaaaagcgtctgtaaccaaagagattttattgccgaatggtcatgaccagatgccattgcagcaaaatatcttcgaagtgatggagaaacttcgcgaaatttatcctcaacgaaagtttgtgatgagccgctttgaagaggtattcgagcagattgaagcgcagcgtgaaagtctggcgaccctgaaaggtgaatttattgatggcaaatatatgcgcgtgcatcgcaccatcggttccacgcgcatggatatcaaagttgcccacgcacgtattgaaaataagattgttaatctgctggaaccgctggcaacgctggcctggacgttgggttttgaataccaccacggcttgctggagaaaatgtggaaagagatcttaaaaaatcatgcccacgacagtatcggttgttgttgcagtgacaaagttcatcgcgaaattgtcgcccgcttcgaactggctgaagacatggcggataatctgctgcgtttctacatgcgcaaaattgccgataacatgccacagagtgatgccgacaaactcgtgctgtttaacctgatgccctggccgcgggaagaagttattaacaccactgtgcggctgcgcgccagccagtttaatctacgagacgatcgcggtcagcctgtaccgtattttattcgccatgcccgtgagatcgatccaggcctaatcgatcggcaaatagttcattacggtaattacgatccctttatggagtttgatatacagatcaaccagattgtcccttctatgggctatcgcacgctttatatcgaagcgaatcagcctggcaacgtgattgcggcaaaaagtgacgctgaagggatactggaaaatgctttctggcaaattgcgctcaatgaggatggaacgctacaactggtagataaagatagcggtgtgcgctatgaccgggtgttgcaaattgaagaaagctctgatgatggtgatgaatatgactattcacccgcaaaagaagagtgggtaatgacttctgcaacagcgaaaccgcaatgcgagattactcatgaggcctggcagagcagggctgttatccgctatgacatggcggtgccgctcaatttgtcagaacgcagcgtccggcaatccacgggcagagtaggggtggagatggttgtcactctgagtcataacagcagacgtattgatgtggatatcaaccttgataaccaggctgacgatcatcgccttcgcgtcctgatccctacaccttttaacaccgacagtgttctggcagatacgcagtttggttcgctaacgcgccccgtgaacgacagtgcaatgaacaactggcagcaagaaggctggaaagaagcgccggttccggtatggaatatgctcaactatgttgccttacaggaagggcgtaacggcatggctgtctttagcgaagggctacgtgaatttgaagtcatcggtgaagagaagaaaacctttgccattacgttgctgcgtggcgtgggcttactgggcaaagaagatctgcttttaaggcctgggcggccttcgggaattaaaatgccagtcccggactcacaactacgtggtctgctttcttgtcgcctaagtttattgagttataccggtacgccaaccgccgctggtgtagctcagcaggcgcgagcatggctgactccagtacagtgttacaacaaaatcccatgggatgcgatgaagctcaacaaagccggattcaacgtgccggaaagttatagtttgttgaaaatgcccccagtgggatgcctgataagcgcacttaagaaagctgaagaccgacaagaagtgattttacggctgtttaatccggctgaatcagcaacctgtgatgcgactgttgctttcagtcgcgaggtgatttcttgctcagaaacgatgatggatgaacacattaccaccgaggaaaatcaaggttcaaatctatcggggccttttttacccggccagtcacggacgttcagttaccggcttgcctgaatagcaatcaaaccgaagccacatatgcgcggccagattgttgacaaagggcgctttgttcatgccggatacggcatgaacgctttattcggtctacaaaagcaggcaaattcaatatattgcagagatgatgtagacactggcaagcgtagcgcatcaggtaattttgcgtttatcttcactctcaagccacgtatatgtggctttatttttaacaaaataataaccctgggtgagttaattataatataat

SEQ ID NO: 251 - DNA, 17614 bp, Escherichia coli
  source 1..17614: mol_type = genomic DNA
tctgattattgatttttcgcgaaaccatttgatcatatgacaagatgtgtatccaccttaacttaatgatttttaccaaaatcattaggggattcatcagtataaagcttccgatgagcgtttatatgtcaataagcagaacaaaaacagccgttcatgataaccttctgtggttgtttgcttgtaatctcaggagcgtgaaatgactgaaatggctaaaggaagcgtgacgcatcagcggttaatcgctttattatcacaagaaggtgctaacttccgcgtcgttacccatgaagcggtaggtaaatgtgaagcggtgtcagaaattcgtggcaccgctttaggccagggagctaaggcactggtatgtaaagtcaaaggcaatggcgtaaatcaacatgttctggcgatcctcgctgccgatcaacaggccgatctgagccaactcgccagccatataggcggattacgcgcttcgttggccagcccggcggaagtcgatgaactcacaggctgtgtcttcggcgcgatcccccctttcagcttccatccaaaactcaaactggttgccgaccctctactcttcgaacgatttgatgaaatcgccttcaatgcagggatgctggataaatccgttattttgaaaaccacggattatttgcgcattgcgcaaccagaactgctcaatttccgccgcactgcgtaactagcctgtccgttcaataagcagaacggacaaaaccagcacaacagcaatggcaaaaaacgatgacgtgataatcagtgtctcgacgaacatttgatcgttcatagcatgcccccgggagatagctgttttcacgttattgttagcgtgcacaaatggcagtttgatgacagttcgcctgattttttatgcaaaaaacgtaaagattttctacttccttcctgcagcaagcgtaaagtaagcaggcttattattttttggcaaggaaaccacgatgtttgatgtcactttgctgatcctgctcgggttagctgcgctgggctttatcagtcataacaccactgtcgccgtttcaattctggtgttgatcattgtccgcgtcacaccgttaagcacctttttcccgtggattgaaaaacaggggctaagtatcgggataatcattctgacgattggcgttatggcccccatcgccagcgggacgctaccgccctcaaccttgattcactcgtttctgaactggaaatcgctggtggcaattgcagtaggcgtgattgtctcctggctgggtgggcgcggcgtgaccttaatgggcagccagccgcaactggtcgccgggctgctggtaggcactgttttaggcgtggcgctgtttcgcggcgtaccggtcggcccgcttattgccgcgggtctggtttcgctgattgtggggaaacagtagttaatcccgcaatatatcggcctggcgtttgccccaggcctttcttaaacatagtaataaaggccgttgttgaatcataccccagcgtatgagcaactttctgtacagtatcgcctttcactaatccctgaagtgccataatcagctgtaactgctgacgccactggcgaaaactcaaccccgtctcttttactatcagtcgcgcaagattgcgttcactcatcgcaaaaaagccagcccattgccctaatgacccccactcgacgggccctttcgccatcatctccaccatcgtgcggattttaggatgagaagaaacgggcaggtgcagctgttgttgtggctgctgagggagttcatcaaacaggacctgaattaatctgtgggtcatcggctcagcacgctgagtcgtcgtcctgtttgccagggttaaaatcaattcccggcataagggcgatattttcaatgtgcaacatgttgtcggcattgtcactgcgctgggttcgataaacagaaaacagagttcagcgttagctgtcacttgattgctatgttccaccccgcccggtatccaaaccgcatattgcggcggcaccatccacaaagcattttccaccgtacaggtaattgcaccatgtagcgccagtatcagctgtcctttgcggtgctgatgtacaggactggttaactcatccgttccggcgtgaatacaaaatgcgaccgcggcttcatggtgtcggtcgggttcatagccattgagattcaacctgtgcatcattttgtccgaatttagcgataatttgtcattttagcttgattcaacataacaataaaaacggtaaggtacagcctcgtttgtaacaatgagaagcatatgacctgttcaacttcattaagcggcaaaaacaggattgtccttatcgctggcattctgatgattgccacaacattacgcgtcacctttaccggcgcagcaccgttactggatacgattcgttccgcttactcgctgacgacagcgcaaaccggcttattgaccaccctgccattattggcctttgcgctaatctcacctttggccgccccggtagcgcgacgttttggtatggaacgtagcctgtttgccgcgttacttttgatctgtgctggtatcgcaattcgctctctcccttcgccttacttattatttggcggtacagcggtcattggtggtgggattgcattaggtaatgtcttactgccaggattaattaaacgcgatttccctcattccgtcgccagacttaccggcgcatattccctgacaatgggagctgcggcggcacttggatcggctatggtagtgccgctggcttttaacgtttttggctggcaagccgcgttgctcatgctgatgtgttttcctctgctggctctttttttatggctgccacagtggcgaagccaacaacatgcaaatttgagtacctcgcgcgccttacatactcggggtatctggcgttcgccgcttgcctggcaggtcacattgtttcttgggatcaactcactggtctattacgtgattattggctggcttccggcgatcctcatcagtcacggctatagcgaagcacaggcgggttcactgcatggtttgctgcaactagccacagcagctcccggtttgctgatcccacttttcttacatcatgtgaaagatcagcgtggtattgcagcgttcgttgccttgatgtgcgcagtgggcgcggttgggctctgctttatgccagcacacgcgatcacctggactctgcttttcggttttggttccggcgcaacaatgatactggggttgacgttcattggtcttcgggcaagttctgcgcatcaggcggcggcactctcggggatggcacaatccgtcgggtatttgctggcagcctgtgggccgccgctgatgggtaaaatacacgatgctaacggtgactggtccgtaccactaatgggtgttgcaatactttcactactgatggcgattttcggactttgcgccggaagagacaaagaaattcgctaatatccggtgctatagtgacgtgacaaatcatgcgtgaaagggagaacaaacacgatgaatattcagtgcaaacgcgtttatgatccggcagaacagagcgatggttatcgcatactggtcgaccgcctctggccgcgcggtatcaaaaaaaccgatttagcccttgatgagtgggataaagaaatcacgccgtcaacggaactgcgcaaagcctttcacggcgaagtcgtcgattttgcaacctttcgcgagcaatatcttgcagcactggcacaacacgagcaagaaggaaagcggctggcggacatcgccaaaaaacagccgctgaccctgctctacgcagcaaaaaacaccacgcagaaccatgcgctggtgctggccgactggctacgtagcttgtgattttagtacagcatccggcggttatttttcaccagccggatggtcacgccgccacaatgcccattcatcaatcgtttcaccgcccggtaatttgcaattgttgctgaccccttgcgctgtctgcactggaatgagcgtcccgcccttctgctggcaatagaccgacgccggatttgccataccaatctgcggcggtttaggtgcttctggctgagaaggggttgaacaaccagccaggaccagcaagcaaggcagaacaaaactgataattttcatttattgatctcacatatttatccaagattagagtatcgcggtatcgttttgttttgcagcactatttttattacattcactcaaaacatattacgtcttgtttcatctttgttgatgatgttttatcatgcctgcaaagattaaataatcagcatttacccgccgtatcctggagttgttccgtgtcagatcagattatcgcccgcgtctcgcaatcccttgccaaagaacagtcactggaaagtctggtccgacaacttctggagatgctggaaatggtcactgatatggaatcaacctacctgaccaaagtggatgtcgaagcgcgcctgcagcatattatgtttgcccgtaacagccagaaaatgcacatcccggagaattttaccgtctcgtgggattactcgttatgcaaacgcgccattgatgaaaactgctttttcagcgatgaagtccccgaccgttggggtgactgtattgcggcacgcaatcttggcatcaccacctttctgagcacgccaattcacttaccggatggatcattctatggcacgctttgcgccgccagcagtgagaagcgccagtggagtgaacgcgcggaacaggttttacagttattcgccggactgattgcacaatatattcaaaaagaggcactggttgaacagctgcgcgaagccaatgctgcgctgattgcgcaatcgtataccgactcgttaaccgggctaccgaatcggcgggcgatttttgaaaatctgacgacactgttttccctcgcccggcatcttaaccataagataatgatcgcgtttatcgatctggataacttcaaattaatcaatgatcgttttggtcataatagtggcgatctgtttctcattcaggttggcgagcgccttaatacgctccagcaaaatggcgaagttattggtcgtctcggcggtgatgagtttttagttgtttcactaaacaacgagaatgcggatatttcgtcgctgcgagaacgcattcagcagcaaatacgtggagaatatcacttaggtgatgttgatttgtattatcccggtgccagtcttggcatagtagaagtcgatcctgaaacaaccgatgcagacagtgccctgcatgctgccgatattgcgatgtatcaggagaaaaaacacaaacagaaaacaccttttgtcgcgcatccagcgctacattcctgaggcgtattcacatccttttgattggtgataacatgcgaatcggtattatttttccggttgtaatcttcattacagcggtcgtatttttagcatggttttttattggcggctatgctgccccgggagcataaagatgaaaaaaacaacgattattatgatgggtgtggcgattattgtcgtactcggcactgagctgggatggtggtaacgtcacctctaaaaaatagcaaaggctgcctgtgtgcagcctttgtgcaatttaagcgttaacttttaatcttcctgtagataaatagcacgacaatcgcaccaataacggcaaccacgaagctgccaaaattgaagccatcgactttaccaaagccaaacagcgtgctgatccatccgccgactacggcaccgactatccccagcaggatagtcataaagaatccaccgccatctttacctggcatgatccacttcgccagaataccggcaataagcccaaaaataatccatgacagaatgcccattgtttcctcacttatctgttttgcattagcgggttagtcgctgataaaaagcatagcacaacatcgggagggcaagatttgtgacgagcatcacggaggttttttttgcgatggcgcagaaattgcgccatcaacgatcagtgataattaccaaccacaaacatcatgttcgttttccgtgtcataagaacgtacggtattcaccagatcttttatcacttcagccgccacttctggcaccagcaaagtcatcggcgtctctgtttcataatcgacagaaacgccattgctgttattggtgacggtcacggtatacgttgctttgcccatgattcatttcccgttatgaatgactttccgttgttgcgcaccttccatcaggacttcaggagccacgaagaagtcaatgttgaaataagtatcgtcagtcatggcttcaatgttgtgccacttttctggagggaacaccgcaaactgccccgcttcgataaggatcacctgatcaggctctgcactgtgttcatcagggtagccgaaatatttgaccgccccatgcataacggaaaggcgtgggtaaacccccgggcgcgttcctttatcaagatgacgttcgaatattccggcaggcgcagtttgtttattccagaaaggcgttgagcgcgtatgaatataattctgtgggatttgcagcatccttttccctccttcggtgaatgcgctgaaaacggtttattccagccgtttcagggtacgcctgataatttgcattttaaataccatttattggttactttttagcaccatatcagagaaaaatcagggaggattacaagtgggaagcccgcgacaacgcgggctgaatgtatcaggattgcagcgtcgccagtcgggcagcgaaacccacgaacatcaaaccaatcagtgagtttcccactttagccagtttctttttggtacgtatgtactgcgtgacaaaagcaccagaaataatcaggaagctcaaatagcagaaactcaccagttccagcgtcgtcgccagaataaagaatgaaattcccgtatgtggggcattaacatcgataaactgtacgaaaaacgacacatagaacaaaatggctttcggattagtcaggctcaaaattaacgcgcgtttaaaaatagcaccgtattggggctcatcggatttggcctcgctatttttacccttcagggtcgcgtaaagaattttactccccagatagagcaaataaaacgcaccaagataacgtacaatgttgaataatatcggggtggtcttaattaatgtcgccactccagcccatgccagaaacatcaataccgcatcgccaataaatacaccgcaggccgcaagataaccgcctttcataccgctactgacgctatttttgagtacaaacagagtatttggccctggcaccaacacaataaaaatggccccaaccagataggtccagtaattcagaaccccgtattcagcgaacacattaacctctttaattatctttcgatcatgcgcgattaaaggtgaatatgctaaccaatctgtagcggcttagaaaggagaaaatcaggttttaacctgatatcaacccgataattgaatcattaatcaggcatgctccagtgaaaaattcgggtagtgctcggcaaaatactggcgtaaaaattctaccgttatccgcactttcgctgacgtcgctagccttgaaacataaacggcccagacgttcgctggctggtaatattccggtagcacttgcactaaatgaccactggcaatgttttcgctaacatcccaccaggagcgcagagcaatcccctgcccatcgagacaccactgatggacaatttctccatgattagacgacagtgggccggtgactttaatcgcatggtggccttctttattgcgtaattgccagacaccaaaaggatgatcgcgctctttaatgaccaggcacggcaatgcggaaagatcggttaaatgtttcggcgcgccatgttgcgcaataaattccggcgacgcgcagagaatgcggtaattagtcgccagtttgcgggcgattaaattaggggcgatgtcatcgccaatgcgaatatcgagatcaacaccttcattgaccaaatcgaccaaccggtcttccacatcaaaacgtaattccagttgcggatacgccttagccagcgctgataacgccggagccaccacctgtcgtccaaaaccaaagctgctgataatacgcagcatcccctgcggcacctgacgcacgtcagaaagttcgtccatcatctgaccgacatcctgcaaaatccgctgcgcccattcataaatccgctctccttcttcggtaatggtgacgcggcgggtggtgcggtgtaacaacaccacgtttagcgtttgctccagcaaggcgatgcgcttgctgacgaacgccggtgaaacgcccagttcttccgccacggcggcaaaaccagcccgacgagccaccagcataaagacgcgcaaatcattcagcagcggtaaattattcatgattcgtgttttatgtttcaccagttacggggattaattccttttcagtcaattataggatggtgatgttgtcaattttgatggtcaggaagtgagaacccaatgatgaaaacgatgcgtattgctgcgatcccgggagacgggattggcaaagaagtccttcctgaagggattcgcgtgttacaggctgccgctgagcgctggggcttcgccttgagttttgagcaaatggagtgggcgagctgcgagtattacagccatcacggtaaaatgatgccggacgactggcatgagcaacttagccgtttcgacgccatctattttggtgccgtcggctggccggacaccgttcctgaccatatttcgttgtggggttcgctgctgaaatttcgtcgtgaattcgaccagtacgtcaacctgcgcccggttcgtctctttcctggcgttccctgcccgctggcgggaaaacagcctggcgacatcgatttttacgtggtcagggaaaacaccgaaggcgaatattcctcgctcggcggtagagtgaatgaaggtacagagcatgaagtcgtcattcaggaatcggtatttacgcgtcgtggtgtcgatcgcattttgcgttatgccttcgaacttgcgcaaagccgcccacgtaagacgctaacttctgccactaaatcaaacggtttagccatcagcatgccgtactgggatgagcgagtggaagcaatggccgagaattacccggagatccgctgggacaagcagcatattgatattctctgcgcgcgttttgtgatgcagccggaacgcttcgatgtggtggtggcgtccaatttatttggcgatatcctttccgatcttggcccggcctgcaccggcaccattggcattgccccatccgccaacctgaatccggaacgcactttcccgtcgctcttcgagccagtccacggttccgcgccggatatctacgggaaaaacattgctaaccctatcgccacgatttgggccggtgcaatgatgctcgattttctcggcaatggcgatgagcgtttccagcaagcgcataacggtattctggcagcaattgaagaagtgattgctcacgggccgaaaacacctgatatgaaaggcaatgccaccacgccacaggttgccgacgcgatttgcaaaattattttgcgttaaggtcaaaccagtttatttgaaccgcgtcactgacgcggtttttttattcgttctttgcagtaaataacctgcgtcatttcaccttttattgtttccgtttcgtgttttatggctttccgtattcttaattgtttaatttatgtaacatgcaaataatcaatttgttaaacacaacatacaactcattaccctgcaaataattacaactggcaaaagccagagacgggcttttatgcccaggagatgactcatgatgagcaatgttaagaaaaaagatgtgccgctgataagcatcagcctggtggccattcttttcatcgcagctgcattaagccttttcccacaacaatcggccgacgcggccaacgcaatatacacttttgttacgcgtacgttaggttccgccgtacaggtattggttttgctggcaatgggactggtgatttatttagccaccagtaaatacggcaatattcgtcttggcgaaggaaaaccggaatacagcacgctctcttggctgtttatgtttatttgtgccggtttaggttcttctacgctttattggggggttgctgaatgggcctattattatcaaacgcctggattaaatatcgcaccgcgttcacaacaggcactcgaatttagcgtcccttactccttcttccactggggcatcagcgcctgggcaacttatacgctggcctcattaatcatggcttatcactttcatgtgcgtaaaaacaaaggtctgagtctttccggcattattgccgcgattaccggcgttcgcccgcaaggcccatggggaaaactggttgatttgatgttcctgatcgccactgtcggcgcactgactatttcccttgttgtcaccgcagcaacctttactcgtggactttccgcgctgaccggtttacccgataacttcaccgtgcaggcatttgtgatcctgctttccggcggcattttttgcctaagctcgtggattggtatcaacaacggtttgcaacgtctgagcaaaatggttggctggggcgcgttcctgctgccattactggtgctgattgtcggcccaaccgaatttattaccaacagcatcatcaatgccatcggtctgaccacgcaaaacttcctgcaaatgagcttattcaccgatccgcttggcgatggttcatttacccgcaactggaccgttttctactggctgtggtggatctcatacacccctggcgtagcaatgtttgtcacccgcgtttcccgcggtcgtaagattaaagaagttatctggggactgatcctcggcagcaccgtcggttgctggttcttcttcggcgtaatggaaagctatgccattcatcagtttatcaatggcgtaatcaacgtcccacaggtgctggaaacactgggcggcgaaacagctgtacagcaagttctgatgtcgttgccagccggtaaattgttcctcgccgcatacctgggcgtgatgattattttccttgcctcgcatatggatgcggtggcctacaccatggctgcgaccagtacgcgtaatctccaggaaggtgacgatcctgaccgtgggctgcgtcttttctggtgcgtggtgatcactctgatcccgctttccatcttgtttaccggtgcttcgctggaaacgatgaaaaccaccgtcgtgctcacagcccttcccttcctcgtcattttactggtgaaagtcggcggatttattcgctggctgaaacaggattacgccgacattccggctcatcaagttgaacattatctcccgcagacaccggttgaagccctggaaaaaacgccagtgctccctgcgggaaccgtattcaaaggcgacaactgagcgccatcatcctaacgataaaggtatccctatgagcaatctgagccctgactttgtactacccgaaaatttttgcgctaacccgcaagaggcgtggaccattcctgcccgtttttataccgatcagaacgcgtttgaacacgaaaaagagaacgtcttcgccaaaagctggatttgcgtcgctcacagcagcgaactggcgaatgccaatgattatgtgacgcgtgagatcattggcgaaagcatcgtgctggtacgcggtcgtgataaggttttgcgcgcgttctataacgtgtgtccgcaccgtggtcatcagttgttgagcggtgaaggaaaagcaaaaaatgtgattacctgcccgtatcacgcatgggcattcaaactcgatggcaatctggcccatgcacgtaactgcgaaaacgtcgccaatttcgatagcgacaaagcgcaactggttccggtgcgtctggaagaatatgccggattcgtcttcatcaacatggaccccaacgccaccagcgtagaagatcagttacccggtctgggcgcgaaagtgctggaagcctgcccggaagtccaagatctgaaactggcggcccgctttaccacccgcacgcctgccaactggaagaacattgtcgataactatctcgagtgctatcactgtggtccggcgcatccaggtttctccgactccgtacaggttgatcgttactggcacaccatgcacggtaactggacgctgcaatacggtttcgccaaaccgtccgaacagtcgtttaaatttgaagagggtacggatgcggcattccacggtttctggctgtggccgtgcacgatgctgaacgtcaccccgatcaaagggatgatgacggtcatttatgaattcccggtggattctgaaactaccctgcaaaactacgatatttacttcaccaatgaagagttaaccgacgagcaaaaatcgctgattgagtggtatcgcgatgtgttccgtccggaagatttacgtctggttgaaagcgtacagaaagggctgaaatcgcgtggctatcgtggtcaggggcgcatcatggccgacagtagcggtagtggcatttccgaacatggtatcgcccatttccataatctgctggcgcaggtgtttaaggactaatgacatcggcggcggtattttccgccgctgggctgatttttgatggagtacagcaatgtcagactatcaaatgtttgaagtacaggtgagtcaggtggaaccgcttaccgaacaggtgaaacgcttcacgctggtggcaaccgatggcaaaccgctgcctgcgttcaccggaggaagtcacatcattgtgcagatgagcgatggtgataaccattacagcaatgcgtattcactactgagttcgccgcatgacacctcttgttatcagattgccgttcggctggaggaaaactcgcgcggcggttcccgctttttgcatcagcaggtaaaagtgggcgatcggttaacgatttcaacgcctaataacctgtttgcgctaattccctcagccagaaagcatctgtttatcgcgggcggtattggtatcacccctttcctgtcgcacatggcagagctgcaacacagcgacgtcgactggcagctacattactgctcgcgaaatccagaaagttgcgcatttcgtgatgagctagtccagcatccgcaggctgagaaagttcacttgcatcactcatcaaccggaacacgactggaattagcgcgattattggcggatatcgaacctggcacacacgtttatacctgtggtcccgaggcgctaaatgaagcggtaagaagtgaagctgcgcgtctggacatcgtcgccgatacgctgcactttgagcaatttgctatcgaagacaaaaccggcgatgcctttaccctggtgcttgcccgttccggaaaagagtttgtggtgccggaagagatgactattttgcaggttattgaaaataataaagccgcgaaagtggaatgtttatgtcgtgaaggggtatgcggaacctgcgaaacagcaatactggaaggtgaagctgaccatcgggatcagtattttagcgatgaagagcgtgccagccagcaaagtatgttgatctgttgttcgcgtgcgaagggtaaacgcctggtgttggatttgtagtttgccaaagccggatgtggcgctgagcgcgcccagtccggcttcggaagattttactgcggatattcctgcaataaattgtgtaatgcttccgccatcagctcaccacgccagccggaaatcagctccggcaaattgttctgcggtttcagtttccagtgccagttcagcagttggttgatttgccgacgcgatgccagcaattcggcgctgatcttatgcgtttcgctcacgtcagtaatcagcgacttaatcgctttaaacactttacgataaccaggcatgtccatcaggttaagcatcggctgcggtaaggcctcttccggcaatgtctgcgctttttccaccagcgccagcagcgttttaccgtgaaagcggatttcgctaccggataaacccaggctgtccagttcgcctaaacttcccggcatataacgcgcgaccgaccacaaatgctcttcacgcacgacaaagttcaccgccagatcacgctctcgcgccttgcgcagtcgccagtcggctaacagttgcagacaggccagttggcgtgtgcgtaactgccaggcattggtgatatcacgccaggcatcttccggcgcaacgacttcctgacgacgcatttgcatcaggcggcattcatccagcgccgcaggtagccagccggaggcctccgtttctaccataagcttggcggtgatcggtaacagataccagacatccgccgctgcgtattcacactgacgttcggtcagcggtctggccagccagtcggtgcgcgattcactcttgtccagcgtaacgccggaatactcttccaccatggaagcgaaaccccatgacatcgggcgtccgcagaaggcagcaaggatttgcgtgtcaatcaagggttgtggtaattcgccaaagacattgaggaacacttccagatcttcactgcctgcatggagaaattttgtgatggacggatcgcgcaggatcgctttcagcggtgaccagtcggtgatcccgagaggatcaattagcgccagatgctcgccatcgaaaagttgaatcaaccccagctgcgggtaataagtgcgcgtacgaacaaattcagtatccagggctatcgccggaaaggcacggacggcttcacacaaagaagccagcgcatcgtccgtggtaatcatttggtaattcaaattgttttctctttagtgggcgtcaaaaaaaacgccggattaaccggcgtctgacgactgacttaacactcaggctttattgtccactttgccgcgcgcttcgtcacgtaattctcgtcgcaaaatttttccgacgttagatttcggtaactcatcacgaaactccaccagcttcggtactttgtagcccgtgagctgacggcggcaaaaggtcaccagtgactcttcggtaagcgatggatcttttttcactacgaagattttcaccgcttcaccactggagccggaaggtacgccaacagccgcgacttcctgtacgccaggatgctgcatgacgacatcttcaatctcgttgggatagacgttaaaaccggaaaccagaatcatgtcttttttacgatcgacaatgcgcaggaacccttcttcatccatcaccgcgatgtcgccggtgtgtaaccagccatttttgatgatctcatctgtagcatccggacgctgccagtaacccagcatcacctgcggtcctttgacacaaagctcacccggttgacccggtggtacttcattatcatcatcatccaccagtttggcttccgtcgacggcaccggcaaaccgatgctaccactatgataatcaatatcatatgggttaacgctgaccagcggcgcacactcggtaaggccatagccttccagcagatactgtccggtcagtttcacccaacgctctgccaccacttgctgcactggcatccctccgcctgcggaaagatgcagactggagaaatccagctgctggaactctttattgttcagcaacgcattgaacaaggtgttaacgcccgtgatagcggtaaacggatatttcgctaactcttttaccaaccctggaatatcgcgcgggttagtgataagcaggttctgcccacccagttcgataaacagcaggcagttaatggtcagggcaaaaatgtgatacagcggcagcgccgtcaccaccagctctttgcccggatgcaacagcggaccataggtcgcgttaacctgttccaggttcgccagcatattgcggtgagtcagcatcgcgcctttcgccacaccagtggtgccgccggtgtattgcagaaaagctaaatcttccggcaccagttcgggtttgacgtactgcatccggtagccgttatgcagtgcgctacgaaatgaaatggcatctggcagatggtatttcggcaccaaacgcttgatgtatttaacaacgaaattgactaccgtgccttttgccgtagatagctgatcgcccatacgggtcagaattacgtgctgaacggcggttttatcaaccactttttccagtgtgtgagcaaagttagacacgataacaatcgccgatgcgccgctatcgttaagctgatgctcaagctcacgcggggtatacaacgggttaacgtttacgacgatcatcccggcacgcaaaataccaaacagcgccaccggatattgcaataaattaggcatcatcaacgcaacgcgatcgcctttcttcagccccaacccttgttgcaaataagcggcaaacgcgcgactgcgttcttccagcttgcggaaggtcattacctcccccatattcacaaacgcaggttgatcggcgtagcgcgcgaccgactgctcaaacatatctaccagagattgataacggtcagggttgatctccgtcggaacgtccgcgggataacggttaagccaaaccttcttcaattcttcacctctaaaatgcgtgttcgtcgtcatcgcaaccccaaatgatatacatgcagttaacataatattaactcatcataccagcttgataattacccaacgaaaaggttgcgaagcgcgtcactatttatttttatctttaccgtaagaatgcagaaacagcggaccagccgctgtttctttttctttaaaaacaagcaattattcagttacaactgtttgtactctcgcggggccgggattataccagccccatccgccgtagccatagggccagccacgaccgccataaaaccatggatcaatcggctgaggcggcataatcacctgctgggttaaatgccaacgtttgtaacccgttacttgcatcaccataaatttatagggcgtattgccgattttgccgtcaaccgcaccagtgattggcccgactaccgtaacaagttgtccacggaaatccaccgggtccagaaaaccgttcacatcggcataaatgcgaccgcgagaaggttctcccagcgtcggtctggctccgctgtccagcggtacggtagcaatttccaggcgggttttcccttgctggttttgtaccgcaaccactttgccaccaaagcgtgcctcctgaccaacgtacagctgcggcgcactcatcacccgaactaaatcttgttgcggcgtgggactgctgcctttaatggcgtccggcacagtgacacaaccgctcagcattagcgcaaacgtacctgccagtatgcctttgataacattcttttgaaccgccatgatgcgactcctttttttctcagggcatactcttaagattcattctttgcccggaagtttcttccatgcgacgttgttacgtaaataaaccggttcggcatgttccaccgccaccgttttaccctcggcaaacatctgacacgcaatcggcagcatatcttccgccgctggcagtaaaacttctccgtcgcgcaaaaccagcccgctctctttaccgagatccggcca

SEQ ID NO: 252 - DNA, 17596 bp, Escherichia coli
  source 1..17596: mol_type = genomic DNA
tttttaatcaccacaaacagcgtgcctaacaagccagcggttaacaaggcaattggcaggatcatcaggaacgtcattacctgatcttcatggcgtttaacgaacggaatcatacttaaggcatagccaaaactggttaccacgctgacccacagcaatccacttaaccagttgaaaaactggaagcggcggtttggcagaccggaaattcccgccatggttggcagcagcgtacggacaaatgcaagaaaacgtccagccagcagcgccagcagaccgtggcggtcaaacatgcaggtggcgcgctggtgatatttagcaggaagctgtgccagccagcctttcaccgttttggtattccctaaccagcgcccctgaatataacttagccagcagcccagacttgctgcggcggtcagaatcgcaatcgtaggcagaaaatccataaccccttgggcaatcaatgcgcctgccagtatcaacaagctgtcgcctggcaaaaatgaggcgggcagcaggccgttttctaaaaacagcgtggcaaacatgacaaagtaaacaacgctaacaatatgaggatccgccagcgcggcaaagtcgtgttgccagagcgcagcgatgatatcttgaataacagccatggactttcctgtggaacagcgtttaagcctttatctacctattgtactcctgattcgtccgggacgccttgatcccggacgcaacaatttaagacttttcacaattaaatgtctgcaaaattgtccaaaagtggcaatgttatacaattcgcgcaaaaccggcgtccagatcggcaatcagatcgtcgacatcttccagaccaatatgcaggcgaatcaaggtcccgctaaaatcgatctcgccttgtgggcgaatggcggcgatatgttctggttgattcgccaggatcaacgattcatacccgccccacgagtaggccatgctgaataaactgaagttatccagatagttcgccagctcttcattactgagttttttcttaagcacaaaggaaaatagcccgctgctacctgtaaagtctcgtttccagaattcgtgtcctttactgccaggcagagcagggtggttaactcgcgctacttgcggatgttctgccagccattcagccactttcagactgctttcatgatgttgacgcaaacgcacacctaatgtgcgcaggccacggctggttatataggcggtatcggcatcgaccatctggcccatcagataggcgttttcccgtagctgctcccagcaacgggcattgcacacggcagtgccaatcatcgcatctgaatgcccaaccagatatttggtggcggcttgaatagaaacatcgatgccaaaatccagcgccttaaacagcacaccggctgcccaggtgttgtcgatcataatgatggcatccggcaccacactgcgtacggcggcaacaatcgccggaacgtcgtggacttccatggtgatggagcctggcgattccagaaacacgattttagtgtttggctgcagatgcttaacgatatcggcaccaatcagcggatcaaaccacgatgtcgttacgcccagtttgctgaggattttgctacagaaatcctgactcggttcataggcggtgttggtcatcaacacatgatcgccctgttcgacaaaagcaagaatcgaattagcaaccgctgccgccccgcagggaaatagcgcgcagcctgcgccaccttccagttcacacatcgcttgttgtaaggaaaaatgggttaacgttccgcgccgtccatagaacaactcgccattggcgcgattgcgcgtcgcgtgctttttggcttccatactctcaaataccagcgaagaagcgcgctgaatcacgctatttaccgcgccaagagtgtattttttgctgcgtcctgcattcaccagttgagtatcaagctttttgtccgccatgtcgggattcctatttttatacgtctggatgtctaaactagcatgaatattcgcgggcgcatcctgaagaattggcataaagcagaaaattttcgcaaatggcgtgctggtgacttttttactgcgtaaacgcaaggaaaagaaagcaaaggtacggcagtatgcaaatagtaatgagaacgactatcaattcgacgtcgttttgatattattatgcgcagattttgtgacttgcgtcctggagatacacagtgggtaataatttaatgcagacggacctttccgtctggggtatgtatcagcacgccgatattgtcgttaagtgcgtgatgattgggcttattttggcctccgtagtcacctgggcaatcttcttcagtaagagcgtagagttcttcaatcagaagcgtcgccttaagcgcgagcagcaactgctggctgaagcgcgttccttaaaccaggccaacgatatcgccgctgattttggtagcaaaagcttaagcctgcatttgctcaatgaagcgcagaatgagctggaactgtcagaaggcagcgacgataacgaaggtattaaagaacgtaccagcttccgtctggagcgtcgggtcgccgcagtgggtcgtcaaatgggccgcggtaacggctatctggcaaccatcggcgcgatttctccgttcgttggtctgtttggtacggtctggggcatcatgaacagctttattggtatcgcgcaaacgcagaccactaacctggcagtcgttgcgccgggtatcgcagaagctctgttagcaacggcaatcggcctcgtggcagcgattcctgcggtcgttatctataacgtatttgcacgccagattggcggctttaaagcgatgctgggtgatgttgcagcgcaggtattgttgctgcaaagccgtgacctggatctggaagccagcgccgctgcgcatccggttcgtgtcgcacaaaaattacgcgcaggataatatccgatggcaatgcatcttaacgaaaacctcgacgataacggcgaaatgcatgatatcaacgtgacgccgtttatcgacgtgatgttggttctgctgattatctttatggtggcggcaccgttagcgacggtagatgtgaaggtgaacttgcctgcttctaccagcacgccgcagccgcgcccggaaaaaccggtttatctgtcggtgaaggcagacaactcgatgtttatcggtaacgatccggtcaccgatgaaacaatgattacggcgttgaatgcgttaaccgaaggcaagaaagacaccaccatcttcttccgagcggataaaaccgtcgattacgagacgttgatgaaggtaatggatacgctgcatcaggcgggttacctgaagataggtctggtcggcgaagaaaccgccaaagcgaagtaaagtagaattgcctgatgcgctacgctcatcaggcctacaaaatctattgcaacatgttgaatcttcgtgcgtttgtaggccggataaggcgttcacgccgcatccggcattaggtgctcaatgcctgatgcgctacgcttatcaggcctacaaaatctattgcaacatgttgaatcttcatgcgtttgtaggcggataaggcgttttcgccacatcaggtaagagtgaattcacaatgatgcccggttgcttttcacaaccgggcatttttttaacctaaatgctcgccgccgcacacaccgtgcacttctgcggtgacgtagctcgactcctgacttgccagataaacatatacaggggccagttccgccggttgccccgcacgtttcatcggcgtttgctgaccaaactgcgggatcttatcctgcgtttgtccgccagaaatttgcagtgccgtccagatagggcctggcgcgacaatattcacccgaatacctttctccgcgacctgttttgccaggccacggctgtagttcagaatcgccgccttcgtagccgcatagtccagtaaatgcggacttggctggtatgcctggattgacgaagtggtgatgatacttgcacctttcggtagcagggggatcgcttcctgggttagccagaacagcgcgaaaacgttaatggcaaaggtcttttgaaactgttcgctggtgaggtctgcaatatcaggaatggcaacctgtttcccggcgaccagcgccataatatccagcccgcctaacgccttgtgcgcttcgtgaaccagcgaacgggcgaatttctcatcgcttaaatcgcctggcagcagaacggctttgcgaccgcattcttcaatgatctttttcacatcctgagcgtcttcttcttccacgggaagataactgatcgccacgtcagccccttcacgcgcgtaagcgatggcggcagcgcgacctattccggaatcgccccctgtcaccagtgctttacgatctttcaggcgaccgctaccaacataggttttctcgccgcaatccggtaccggtgtcatcttcgcctggatgcctggcgtcggttgtttctgtttgggatattcaccagtgtaatactgcgtggtcgggtcttttagatgagacatcgtttttctcccttcaggttcaacgtcctttaagggtagacgctctcgatgcgttgataagggaaccaggaagatccctaaacctcagaattatgcgacaaaggtttaacgtatatgttgatttgctgttgcgtgctgtttactcaattgcgatatactgttgcccgttttaactacacgacaggaatgtatggaacgttttcttgaaaatgcaatgtatgcttctcgctggctgcttgcccccgtgtactttggcctttcgctggcgttagttgccctggcgctgaagttcttccaggagattattcacgtactgccgaatatcttctcgatggcggaatcagatttgatcctcgtgttgctgtcgctggtggatatgacgctggttggcggtttgctggtgatggtgatgttttccggttatgagaatttcgtctcacagctggatatctccgagaacaaagagaagctgaactggctggggaaaatggacgcaacgtcgctgaaaaacaaagtagcagcgtcgattgtggcaatttcttccattcacctactgcgcgtctttatggatgcgaaaaatgtcccggataacaaactgatgtggtacgtcattatccatctgacgtttgtgctttctgcatttgtgatgggctatcttgaccgactgactcgtcataatcactgatctgattcgggcgcggttcgcgcgcccgttattaacaggtcatttatcggacgacgcctgccacagattcagctcgccatcggcgatatgctgatcaatctgcgccagctcctcggtgctaaatgtcagattattcagcgcctgcacgttctcctctagttgctccgcgcggctggcaccaatcaataccgacgtcacgcgatcatctttcaacaaccagcttaacgccatttgcgccattgattgtccacgctgctgtgccatttcattcaataagcgcaggctgttgaggttggcttcggtaagcattttcggtgtcagaccacgaactttattcccttcacgatacatccgtgaatcttgcggaatgccgttgagatattttccggtcagcaatccctgagccagaggagtaaaggcaatacagcccacgccgttattttgcagggtatccagcaggccgcttttatccacccagcggttcagtaaattgtacgaaggttgatgaattaaaagcggaattttccactcgtgcagcaactcgaccattttttgcgtccgctctggcgagtaagaggagatcccgacatacagcgccttaccgctttgtaccgcatgagccagcgcagaggcggtttcttccatcggcgtattttcatcgacgcgatgagagtaaaagatatcgacatactcaagccccatacgcttcaggctttggtcgaggctggcgagcaggtatttacgtgaaccgccagagccgtaagggccgggccacatatcgtagccagccttggtagagataatcagttcatcgcgataagcggcaaaatcctcccgcagcaggcgaccaaagttctcttctgcgcttcctggaggcggcccgtaattgttggctaaatcaaagtgcgtaatgcccaaatcaaacgctttacgcaggatcgcacgctgtgattccagcgcgttaacgtgaccgaaattgtgccataaaccgagcgataacgcgggcaggcgtaaaccgctttttccgcaatagcggtattgcatctgcccgtaacgttcgggattcgctaaccagaccatgacctctcctttccaccgttcaatttcgaaacaatgtttctagtttagcgattcgccagcgcgtatcccgtagtctggctcacagagtgacgaaaaactgggcaaaaacacgtgcttatgctttgcttaaaagaaacaccagttgaggagtgcaacgatgccgcgtttaaccgccaaagatttcccacaagagttgttggattactacgactattacgctcacgggaaaatctcgaaacgtgagttcctcaaccttgcggcgaagtatgcggtgggcgggatgacggcattagcgttgtttgatttgctcaagccaaattatgcgctggcgactcaggtagagtttaccgacccggagattgttgctgagtacatcacgtatccttcgccaaatggtcacggcgaggtacggggttatctggtgaaacccgcaaaaatgagcggcaaaacgccagccgtggtagtggtgcatgagaatcgtggactgaatccgtatatcgaagatgtggcacggcgagtggcgaaggcggggtatatcgccctggcacctgacggcttaagttccgttggaggttatccgggaaatgatgataaaggtcgtgagctgcaacagcaggttgatccaaccaaactgatgaatgatttctttgccgcaattgagtttatgcaacgctatccgcaagcggcaggcaaagtgggtattaccggattttgctatggcggtggcgtatcgaacgcggcggctgtcgcgtatccggaactggcctgcgcggtgccgttttatggtcgtcaggcacccactgccgatgtggcgaagattgaagcgcctttactactccacttcgcggaactggacacccgaatcaacgagggctggcctgcttacgaggcggcgttgaaagccaataataaggtttatgaggcgtatatctatccgggggttaatcacggattccataatgattccacgccccgttatgacaaatctgccgccgatcttgcctggcaaaggacactgaaatggttcgataaatatctctcctgataggtttatctcttactggattacgtcttaaacaagcatgaaaaaatagcgtgcgcaaaagtcgttctttgcctaaaatatcgctatatatggcgatatatagcgaatgaggtgaacgatgaataaccattttggtaaaggcttaatggcgggattaaaagcaacgcatgccgacagtgcggttaatgtgacaaaattctgtgccgattataaacgcggttttgtattaggctactcacaccggatgtacgaaaagaccggagatcgccagcttagcgcctgggaagcgggtattctgacgcgccgctatggactggataaagagatggtaatggatttctttcgtgagaataattcctgttctacgttgcgcttttttatggccggttatcgcctcgaaaattgatcaaacatacgtattatcttgctttaattaattacactaatgcttcttcccttcgttttagcgccccgccgcagtatcatgatatcgataaccataataaatgtgtggtaaatggcgcatcgatcgcattattgattttgcgattgaggcaaaatatatgccaggtcttcgcaacggaataactataaatgactggagataacaccctcatccattctcacggcattaaccgtcgtgatttcatgaagctttgtgcagcattagccgccaccatggggttaagtagcaaagccgctgcagagatggccgaatcggttactaacccgcagcgtccgccagttatctggattggcgcgcaggagtgcaccggttgtacggaatctctgcttcgtgcaacgcatccaacggtagaaaacctcgtgctggagactatctctctggagtatcacgaagtgctttccgccgccttcggtcatcaggtcgaagagaacaaacataacgcacttgagaagtacaaagggcagtatgtgttggttgtggatggttccatcccattaaaagataacggtatttattgcatggttgctggtgagccgattgtggatcacatccgcaaagcggcagaaggcgcagcagcgattatcgctatcggttcctgctctgcgtggggcggtgttgccgcagctggagttaacccaactggcgcagtcagcctgcaagaagttctgccaggcaaaaccgttatcaatattccgggctgcccgccgaacccgcacaacttcctcgcgaccgttgcgcacatcatcacttacggcaaaccgccgaaactggatgacaaaaatcgtccgaccttcgcctatggccgtctgattcacgaacactgcgaacgtcgcccgcacttcgatgctggtcgttttgccaaagagttcggtgatgaaggccaccgtgaaggctggtgcctgtaccacctcggctgtaaagggccagaaacttacggcaactgctcaacgctgcaattctgcgatgttggcggcgtgtggccggtagcgattggtcacccatgctatggctgtaacgaagaaggtatcggcttccataaaggcatccatcagcttgccaacgtcgaaaatcagactccgcgttcacagaaaccggatgttaacgctaaagagggcggcaacgtctctgcaggcgctattggtttgctcggcggtgtggttgggctcgttgccggtgtcagcgtgatggcggtgcgtgaactgggtcgtcagcaaaagaaagataacgctgactcacggggagaataaccgtgaacagacgtaattttattaaagcagcctcctgcggggcattgctgacgggcgcgctgccgtctgtcagtcatgcggctgctgaaaaccgcccgccaattccgggatcgctggggatgttgtacgactcgaccttgtgcgtaggctgccaggcttgcgtcaccaagtgtcaggatatcaacttccctgaacgtaacccgcaaggggaacagacctggtcgaacaacgacaaactgtcgccgtataccaataacatcattcaggtgtggaccagcggcacaggggtcaacaaagaccaggaggagaacggctacgcgtacattaagaaacagtgtatgcactgcgtcgatccgaactgtgtctctgtgtgcccggtctctgcactgaaaaaagatccgaaaaccggcattgtccattacgacaaagacgtgtgcaccggctgccgttactgcatggtcgcctgtccgtacaacgtgccgaagtacgactacaacaacccgtttggtgcgctgcataagtgcgagctgtgcaaccagaaaggtgtggaacgtctcgataaaggcggtctgcctggctgcgtagaagtgtgcccggcgggcgcggtgattttcggtacgcgtgaagagctgatggcggaggcgaaaaaacgtctggcgctgaagcctggcagcgaataccactatccgcgtcagacgctgaaatctggcgacacttacctgcatacggtgccgaaatattatccgcatctgtacggcgagaaagagggcggcggtactcaggttctggtactgacgggtgtgccttatgaaaatctcgacctgccgaaactggacgatctttctaccggtgcgcgttccgaaaatattcaacacaccctgtataaaggcatgatgctaccactggctgtgctggcgggcttaaccgtgctggttcgtcgcaacaccaaaaacgaccatcacgacggaggagacgatcatgagtcatgatccacaaccgctgggcggcaaaatcatcagtaaaccggtcatgatttttggaccgttaatcgtcatctgtatgctcctgattgtgaagcgtctggtgttcggtctgggctctgtctctgacctgaacggcggcttcccgtggggcgtgtggatcgcgtttgacctgctgattggcaccggctttgcctgtggcggctgggcgctggcgtgggcggtatacgtctttaaccgtgggcaataccatccgctggtgcgtccggcgctgttggcgagtctgtttggttactcactgggtggcttgtcgatcactatcgacgtgggtcgctactggaacctgccgtacttctacattccgggccacttcaacgtgaactcggtactgttcgagacggcggtctgtatgaccatctatatcggcgtgatggcactggagtttgctccggcactgtttgaacgtctggggtggaaggtgtcgctacagcgactaaacaaggtgatgttcttcatcatcgcgctcggtgcgctgctgccgaccatgcaccagtcttcaatggggtcgctgatgatctcggcgggctacaaggtgcatccgttgtggcagagctatgaaatgttgccgctgttctcgctgctgacggcgttcatcatgggcttctcgattgtcatctttgaaggttcgctggtgcaggcgggtctgcgtggcaacggtccggatgaaaagagtctgtttgttaagctgaccaacaccatcagtgtgttgctggcgattttcatcgtgctgcgctttggcgagcttatctatcgcgacaagctgtcgttagcgtttgccggtgacttctactccgtgatgttctggattgaagtcctgctgatgctcttcccgctggtcgttctgcgtgtggcgaagctgcgtaatgattcccgcatgctgttcctgtcagcactgagcgcactgttaggttgtgcaacctggcgtctgacctattcgctggtggcattcaacccgggcggcggttacgcctacttcccgacctgggaagaactgttgatttctattggttttgtggctattgagatttgcgcttacatcgtactcattcgtctactgccgatacttcctcctttaaaacaaaacgatcataatcgtcatgaggcgagcaaagcatgagccagagaattactattgatccggtaacccgtattgaggggcatttacgcatcgattgcgaaatcgaaaatggcgtcgtttcgaaagcatgggcttccggtaccatgtggcgcggcatggaagagatcgtgaaaaaccgcgatccgcgcgatgcatggatgattgtgcaacgtatctgtggcgtatgtactaccactcacgcgctgtcttccgttcgtgcggcagaaagtgcgctgaatatcgacgttccggttaacgcgcaatacatccgtaacatcattctggctgcgcacaccacgcatgaccatattgttcatttctatcagctttcggcgctggactgggtggacatcacttctgcactgcaagctgacccaaccaaagcctccgaaatgctgaaaggcgtttcgacctggcacctgaacagtccggaagagttcaccaaagttcagaacaagatcaaagatctggttgccagcggtcagttgggtattttcgccaatggctactggggtcacccggcgatgaaactgccgccggaagtgaacctgattgcggtagcgcactacctgcaggcgctggagtgccagcgtgacgctaaccgcgtcgtggcgctgctgggcggtaaaacgccgcacattcagaacctggcggtaggtggtgtcgcgaacccgatcaacctcgacggtttgggcgtgctgaaccttgagcgcctgatgtacatcaagtctttcatcgacaagctgagcgactttgttgaacaggtttataaggttgataccgcagttattgccgcgttctacccggaatggctgacgcgcggtaaaggtgcggtgaactacctgagcgtgccggaattcccgaccgacagtaaaaacggcagcttcctgttcccgggcggctacattgagaatgcggatctgtcctcgtatcgtccgatcacttctcattccgatgaatacctgatcaaaggcattcaggaaagcgcgaagcactcctggtataaagacgaagcgccgcaggcaccgtgggaaggtaccaccattccggcttatgatggttggtctgacgacgggaaatattcctgggtgaaatcaccgactttctacggcaaaacggtagaagtgggtccgctggctaacatgctggtgaaactggcggcaggacgcgagtctacccagaacaaactgaatgaaatcgttgcgatttatcagaaactgactggtaacacgcttgaagtggcgcaactgcactctacgctgggccgtattattggtcgtaccgttcactgctgcgaattgcaggatatcctgcaaaatcaatacagtgcactgatcaccaatatcggtaaaggcgatcataccacctttgtgaagccgaacattccggcaacgggtgagttcaaaggtgttggcttcctcgaagcgccgcgcggtatgctctctcactggatggtgatcaaagacggtatcatcagtaactaccaggcggttgttccatcaacctggaactctggtccgcgtaacttcaatgatgacgtcggtccttacgagcagtcgctggtgggtacaccggttgccgatccgaataaaccgctggaagtggtgcgtaccattcactccttcgacccgtgcatggcctgtgcggtacacgtagtggatgctgacggcaacgaagtggtttcagtgaaggttctgtaatgcgtattttagtcttaggggtcggcaatattttgctgaccgatgaagccatcggtgtgcggattgtcgaagcgttagagcaacgatacattctgccggattatgttgagatcctcgatggcggcacggcgggaatggagctgcttggcgacatggcaaatcgcgatcatctgattattgcggatgccattgtgtcgaagaagagcgcgccgggaacgatgatgatcctgcgcgatgaagaagttccggcgttgtttaccaacaaaatctctccgcatcagcttggcctggccgacgtcttgtcggccctgcgcttcaccggtgagtttccgaaaaagctgaccctggtcggcgtgatcccggaatcgctggagccacacatcggcttaacgccgacggttgaagcaatgattgaacctgcgcttgagcaggttctggctgcgctgcgtgaatctggcgtggaagccatcccacgggaggcgattcatgactgaagagatagcaggtttccagacctccccgaaggcgcaagtacaggcagcgtttgaagaaattgcccggcgttcgatgcacgatctctcttttctgcatccttcaatgccggtgtatgtttctgattttacgctgttcgaaggtcagtggacggggtgtgtgatcaccccgtggatgctgagtgcagttatcttccccggcccggatcaactctggccgctgcgcaaagtgagtgaaaaaattggtctgcaactgccgtatggcactatgacctttaccgttggcgaactggacggtgtttcgcaatatctctcctgttcgctgatgtcgccgctttcgcacagcatgtcgattgaagagggccaacgcctgacggatgactgcgcacgaatgatcctttcgctgccagtcacgaatccggatgtaccacacgcagggcgtcgcgccctgctgtttggtcgcaggagtggcgaaaatgcatgagttgtctctttgccagagcgccgttgaaattatccaacggcaggcggagcagcacgatgttaagcgcgtcaccgccgtgtggctggaaattggcgcgctctcctgcgttgaggagagcgccgtccgttttagttttgaaattgtctgccacggaacggtggcgcaagggtgcgatttacatatcgtctataaacccgcccaggcctggtgctgggattgcagccaggtggtggagattcatcagcacgatgcgcagtgtccgctctgtcacggcgagcggttgcgtgtcgataccggcgattcgctgatcgtcaaaagtattgaagttgaataaccggagttaataatgtgtattggcgttccaggccaggtgctggctgtcggtgaagatattcaccagcttgcgcaggttgaagtatgtggtatcaagcgcgacgtgaatatcgccctgatttgtgaaggtaaccctgccgatctactgggccagtgggtgctggtacacgtcggatttgccatgagcatcatcgacgaagatgaagccaaagccacattagacgcactgcgccaaatggattacgacattaccagcgcgtgatgattagctttcgtaggcctgataagacgcggcagcgtcgcatcaggcattgtgcacgattgccggatgcggcgtgaacgccttatccggcctggatggcttgctgcgacgaacaccaacccttacccctgacgcttatcttccgtattcgtctcgaaatcactggcgtcatggcgctcatgcaactgctcattcagcggtccgttggtgcggttaacaatacgcccacgtttcaccgccggacgttcgcctacttctttcgcccagcgttgtacatgcttataactgcccgcatcaagaaactcagcggcatcatacacaccacctaacaccacgttgccaaaccacggccaaatcgccatatccgcaatggtgtactcatcgcccgcaacaaacttatgctgcgccagttgcttatccagcacgtcgagcagacgtttggcttccatggtaaagcggttgatggcgtactcaatctttaccggtgcgtaatggtaaaagtgaccaaaaccaccgccgaggaacggtgccgcgccctgtaaccagaacagccagttcatcgtttcagtacgctttgccaaatcctgcggcaggaagtagccaaatttctccgccagataaagcaggatcgaaccagattcaaacacgcggatcggcggattatgcgtatgatcgcgcagcgccgggatcttcgagtttgggttcacttcgacaaagccgctggagaattgatcgccatcgccaatacgaatcagccaggcgtcgtactctgcaccagtaacgcccagcgccagcagctcctcaagcataatcgttactttctgaccgttcggcgttcccagcgaataaagttgcaatgggtgtttgccaacgggcagcgttttttcatgcgtcggaccagaaaccgggcgattgatattggcgaacgcgccgccagcggatttatcccacgtccagactttcgcgggctgataagtattgtctgtcatagtgagttgccttctgagtggtagtgttgaagcagtgtagcaggtcacttgctgtacagaatgtgaattttttaaccctttgcgccagccgctgcgatgaggtgtatgattagtctgacctctgtccggttaatgtcgctgagcaggtaatcagagcacaacaattacgccaactgcttaggttgtattgttaaaggtaaagtgatgagcaaaggaacgaccagccaggatgccccgttcgggacattattgggctacgccccaggtggggtagcaatctactcttcagattacagttctctcgatccgcaggaatacgaagatgacgccgtattccgtagctatatcgacgacgaatatatgggccacaagtggcaatgcgttgaatttgctcgccgttttctctttctgaattacggtgtggtctttactgacgtgggtatggcgtgggagattttctcgctgcgcttcctgcgagaagtggttaatgacaacatcctgccattgcaggcatttcctaacggctcgccgcgtgcgccggtcgcgggtgcgcttcttatctgggataaaggcggtgaatttaaagacactggccatgtcgccatcattacccaattgcatggcaacaaagtccgtattgcggaacagaacgtgattcattccccgttgccgcaagggcaacagtggacgcgtgagctggagatggtggtcgaaaacggctgctataccctgaaagacacttttgatgacaccaccattctgggctggatgatccagacggaagatactgaatacagcttaccgcagccggaaattgcaggcgagctgctgaaaatcagcggagcgcgcctggaaaacaaaggccagtttgacggtaaatggctggatgaaaaagatctgctgcaaaacgcctatgtgcaggccaacggtcaggtgatcaatcaggatccttatcattactacaccattaccgagagtgccgagcaggagctaattaaagccaccaacgagctgcacctgatgtatcttcacgcaaccgacaaggtgctgaaagatgacaacctgctggcgctgttcgacatcccgaaaatcctctggccacgtttgcgtctctcctggcagcgtcgccgtcaccatatgatcactggtcgtatggatttctgcatggatgagcgtggcctgaaggtttacgaatacaacgccgactctgcctcatgtcataccgaagcgggcttgatcctcgaacgttgggcggagcagggctataaaggcaacggcttcaatccggcggaagggctgattaacgaactggctggtgcctggaaacacagtcgtgcacgtccgtttgtccatatcatgcaggacaaagatatcgaggaaaactatcacgcgcagtttatggagcaggcgctgcaccaggcgggctttgaaacgcgtatcttgcgcgggctggatgaactgggctgggatgctgccgggcaactgattgatggggaaggacggctggttaactgcgtgtggaaaacctgggcgtgggaaaccgcgtttgatcagattcgtgaagttagcgaccgtgagtttgctgcggtgccaatccgtaccggtcatccgcaaaacgaagtgcgtcttatcgacgtattgctgcgcccggaagtgctggtctttgagccgctgtggacggtgatccccggcaacaaagcgattctgccgatcctctggtcgctgttcccgcaccatcgttacctgctggataccgatttcactgttaatgatgaactggtgaaaacaggttacgcagtgaaaccgatcgccggtcgctgtggcagcaatatcgacctcgtcagccatcatgaagaggtgctggacaaaaccagcggtaaatttgccgagcagaaaaacatctatcagcaactgtggtgtttgccgaaagtggacggtaaatacattcaggtatgtaccttcaccgttggcggcaactacggtgggacgtgtttgcgcggtgatgaatcactggtcatcaaaaaagagagtgatattgaaccgttaattgtggtgaaaaagtaatacatgttgtagcaaccccgtactgattatgaagaataatcagtacgggga

SEQ ID NO: 253 - DNA, 17583 bp, Escherichia coli
  source 1..17583: mol_type = genomic DNA
tgggtagaagcggagcaactctttggctgcctgcgccagtttaatggcgacattaccctgcagcctggtctggtgcatcaggcaaatggcggtattctcatcatctctttgcgtacactgctggcgcaacctctgctgtggatgcggctgaaaaatatcgttaaccgcgagcgttttgactgggttgcgtttgatgagtcgcgccctctccccgtctctgtgccttcgatgccattgaagctgaaagtcattctggtaggcgaacgcgaatcattggctgatttccaggagatggagccagagctttcagagcaggctatttatagcgaatttgaagatactctgcagattgtcgatgcggagtcagtaacccagtggtgtcgctgggtgacatttaccgccagacataatcacttacctgcaccgggagcggatgcctggccggtacttatccgcgaagcagcacgctacaccggtgaacaagaaacacttccgcttagcccgcagtggatcctccgccagtgtaaagaggtcgcctccctgtgtgatggcgacaccttctccggcgagcagctaaacttaatgctgcagcagcgtgaatggcgcgaaggtttcctcgctgaacgtatgcaggatgagatccttcaggagcaaatcctgattgaaaccgaaggcgaacgcatcgggcaaattaacgccctttcggtcattgaatttccgggtcatccacgcgcttttggcgaaccttctcgcattagctgcgttgtgcatattggcgatggtgaattcaccgacatcgaacgcaaagcggagcttggcggcaatatccatgcgaaagggatgatgatcatgcaagcgttcctgatgtcggaactacagcttgagcaacagatccccttctcagcatcgctgacatttgagcagtcatacagtgaagttgatggagatagtgcctcgatggctgaactctgcgccctgataagcgccctcgccgatgtgccggtgaatcagagtatcgctatcacaggttcagtcgatcagttcggtcgcgcccagccggtcggtggtttaaatgagaaaatcgaaggcttctttgctatttgccagcaacgtgagttaaccgggaaacaaggtgtcattatccccacagctaacgttcgccatttaagtcttcacagtgaactggtgaaagcggtagaagaaggcaaattcaccatctgggcagtagacgatgtgactgacgcactgccgttattattaaatctggtgtgggatggcgaaggccaaacgacgctgatgcaaaccatccaggaacgtatcgcgcaagcatcgcaacaggaaggacgtcaccgttttccatggccattacgttggctgaactggtttattccgaactgatcggacttgttcagcgtacacgtgttagctatcctgcgtgcttcaataaaataaggcttacagagaacatggtagataaacgcgaatcctatacaaaagaagaccttcttgcctctggtcgcggtgaactgtttggcgctaaaggcccgcaattgccagcaccgaacatgctgatgatggaccgtgtggtcaaaatgaccgaaacgggtggtaacttcgacaaagggtatgttgaagcagaactggatatcaatccggatctgtggttcttcggatgccactttattggcgatccggttatgccgggatgcctgggcctggacgcaatgtggcagctggtagggttctacctcggctggctgggcggcgaaggtaaaggccgcgcgttgggcgttggcgaagtgaaattcactggtcaggtactgccgacagcgaaaaaagtgacctaccgtattcactttaaacgcattgttaaccgtcgtctgattatgggcctggcggatggcgaagtgctggttgatggtcgtctgatctataccgccagcgacctgaaagtcggtctgttccaggatacgtctgccttctgattataatcagacagagtatcaaaaggcgaaacctccgcaatgcggaggtttctttttaaagagacagaatcaggccattactaccctgtccgccatggcttctcgccagcctcccagccattgtgacctttgattcagcgtctgatagggacacatttcttttgagcgtccggcgatgccggcctgataaccacgttgatgtgcccgttccaggcgatctcgtttttgtctcttcatgcctcgtttccctcatactggtttctggtggaaaagaaaacagtgattactaaatgtgcaatcacagttaagcaataccgcgaatcataactgccgtcaatgcgcaaaattcacgccactgtcatatttgtgagctacacgggcatgtcggttgtacaaaaaatgtgaagaggaacaaatttttccgcacgttagagacaaaaaaaccgcctcaggcaacataccggagacggttatatttacaaatctttataattaaggtagacgctttatctcttgtgcaatagaagcggcttcctgactccagacaccggccagcactttaaccatctcatcgtaaccatcctgagtttgcactccttccagacggaacggacgtttgatcagttgtccctggtggttcaacagccactcaccactgacaatgaccttgccatcatagcgaccgttaaactccgttacggtaacattgagcgtgtcctgggcgcttcccagaggctgggaggcaaccacccagccgggcagttgcgtactcaggttggcaaccagggtgttgcgcaactgttgatccaacgggctggcccacaagttgttgttggcaatcacatacttcacatcactggtttgataaaccacaccattccccgccagatagtcaggaacagtgacctgctctacccataacagacgattgccctggctggcggtactttgtgtaccgctctgcaccacaggtaactggtaatagtttttattaatttcgccggagctgcatccggccagccacagtgctgcaatcgtcactagccactttttcattgtttcgccctcttcggctctggatcttttttgtccttcgcttcaaataccagcgcgttactcttctcattgagcgttttcagcaccggttgcagttctcgcaacacctgatcaaggcgctgcatatccgccaccatcttgttgtaggctgcggagccaggctggaagccctgcatgctgcgattcaattcacgcaacgttgactgcatatccgtcggcaactgctgcatcgactggctagcgaggatcttgttcatgctatccagcgtcgtttgcaggtttttcattgtgcgctgactttcataaagcgtactggttgcctgttcaatcatcggattcaatggcagtttgttgatcttatccaacgcttccatcagtcgttgctggatttgcgccaggccgccgctaacggtcgggataatctgataaccattaaattcacgaataccggttattgcaggcgtatttggatagaaatcgagatcaacatacagtgcaccagtgaccaggtttccggttttcagcgatccgcgtaaaccacgtttcaacaattcgccaaggtgctcaacaacatccgcattttcgccaagctgcattttcagccgctctggctcgatacgaatcagtaccggaatacggtaatcatcgttaaatgtctgacgcatattcggcgcaaagaatggcactttgcttacggtacccaggcgaataccccggaactctaccggagctcccggttgcagaccgcgtaccgaatctttaaagaacatcagataatcaatgtgatcggtgtacaacgaatcctgaannnnnnnnnnnnnnnnnnnnnnnnnnnnnncgtcagatcaaccgcaatgccactatctttccagaagcgaacattgttggtcaccagtcggtcataaggtgcattgatgaacagttgatagctgatattgcgtttttgtgtatcgaaggtgctggtttcaaccgaacctacccgatagccacggaacagcaccggatctcctggcgagagctgcccggcttttttgctatcgagaatcacacggatacctttcgcatcaggcggggccaacggtggcgagtccagcaaatcgtatttatccattttgctgcctttcgcgcctggctgcagttcgatataaactccagacagcagcgttcccaggccgctaatcccttcgcgaccaatctgcggtttcaccacccaaaagacggtgtctttatgcagcaatttttccataccggaattcagccgcgctttgatttcaacgtgcgtcaaatcatcagccagtgtggcgctttcaaccacgccgacgtcaacgctacggcttttaatggtggttttgccaccttcaattccttccgcattcgcggtgatcagggtcacttccggtccctgatggctgtaatgataaaaaagaacccaggccccaatgagcgccgtgacgataggaaatatccacacgggagaccagttcttcactttctggattttggcttccccattattagattccatactgtcaggactcctcatgctctgattcaggttgacgatcccacgacaaacgcgggtcaaacgtcatagcagaaaacattgtcattatgacgactaaagcaaacattaatgcacccattgccggataaatactcattaaacctcccatacgcatcagcgccgagagcaccgcgataacgaaaacgtcaatcatcgaccagcggcctacaaactcaacaacttcataaatcaaatgcattctttcactgtcgcgcttgccatgccctttggcatcccaacacagccacgcgatggcgatcatctttaacgttggcaccataatactggccagaaagatcaccgcagcgacgggataagagccttcgctccataacagaatgaccccagcgagaatcgtcgacggcatcttcgagcctaataaatccgtcaccatgatgggcaaaatattagccggaagatacagcatgatggacgttacaagcagcgcgagtgtccactgcaggctgtttctacgccgaacgtaccctttggtactacaacgcgggcacacgggttcatcagcaggaaggattgccgtacaacaggagcacgaacgcagcccctgacgtatccccgtgacgcctggttttagcggctggcgcagttctggcatcggggcgatgtcgtcccataaccagcgacgatcaacgcactgaaaagcgcgcagttgcaggacacaaaataaacaccaggggagaaagctgctgcctaccccaatgctgccgtaagccatcagtttaacgaaactgaccagcacaccagcgaggaaaatctccgccattccccaggttttgagttgaaaaagcacccgtgccagttgctcttttaaacggaccggtaattccgcgcgattcaccagtaacagaatggttatcagacaaaacgcgggaaccagttgcacaaacaacaggaaaaaggtgccgaggctggcgtagtcctcagaaaaaagcacgccgggaatttccagtaatgtaatttcactggtaactcctgcaacgttcatattcacaaaaggaaacaagttggacagcaacagcatgaacagtgcagccaacgcataggcggtggtacgctgccgagggtcatcccacgccacggttaacgttgtgccacaccggggacatgccgctttctgaccatgctcaaggcgcggtaacgccaccagcatgtcacactgcgagcacaggatgtgcttcgcggcatgatgatgttcgcacattggtactccttaatgatgcgctattttacagatgactaacaaagtgttggttttcatgcctgataaacccagttcatcaggcaattttaccgttgtcagctgtctctgtttaaatcgactattttgcgctcagccaccattttttaacgcttcaagatactcccagcgttcaaaggcttgctccagctcctgctctgcagcagccatatcggcgagcactttttgtgtctgctcatgtggctgactgaagaaggaagcatccgccacctgcgtctgtagggcttccagcttcgcctccagatcttcgagcaattgcggtagctgctccagttcgcgctgcaatttatagcttagtttgctactgctgcgttttacagtttctgcttttgccgcggcggcttcttcggtttttttcaccgcaggctgtttgagcgccacatactgctcttgctgaccacgggcatcatgataaccgccgacataacgaccaattttaccgccgccttcgaagatccaacattctgtaacggtgttatcgacaaactgacgatcgtggctaaccagcaataccgtgccctgatagctgtcgatcagttcttccagcagttccagcgtttcgacatcaagatcgttggtcggttcgtcaagaatcaataagttgcttggtttgaggaacaaacgcgccagcagcaagcggttccgctcaccgccagaaagcgcacgtaccggcgtcatcgcccgtttcggatggaacagaaagtcctgcaaatagcccaatacgtggcgtggcttgccgttaaccatcacctcttgcttaccttcggcaaggttatccatcaccgttttatcgggatccagttccgcgcggtgctgatcgaaataagccacttccagtttggtgccaacgtgaatacgcccgctgtccgcttgaagctgaccgagcatcagtttcagcagcgtggttttgccgcacccattcggaccaatcagggcaattttgtcgccacgtagaacctgggccgaaaaatctttcaccagttgcttaccgtcaacctggtagcaaacgtcttccatttcgaaaacgatcttaccggagcggctggcctcttccacctgcatctttgcggtacccatcacttcgcgacgttcaccacgctcgcgacgcatcgctttcagggcgcgtacgcggccttcattacgggtacggcgtgctttgatcccctggcggatccacacctcttcctgcgccagtttgcgatcgaactcggcattttgtaattcttccacgcgcagggcttcttctttttccagcaggtactggtcgtaattccctagataggtcaccagcttgccgcgatcgagatcaacaatgcgcgtcgccatattgcggataaacgaacggtcgtgggagatgaaaataatcgtcccgttgaaagttttcaaaaacccttccagccagtcgatggtttcaatatccaggtggtttgtcggttcatcaagcaacagcacgcgcggattactcaccagcgcgcgtcctaatgccgctttacgcaaccagccgccggaaagcgacgacagcgcaacgttaggatctaaccccagttgcgccagcacttcgttgatgcggttttccagctgccacaggttgtggtgatccagctgttcctgaaccttcgccaattcgttgagatttttctcgctcgggtcgttcatcaccaggcgcgaaatatcgtgatagcgtttcagatattccgcttgttcttcaatgccttcggcaacgaaatcataaacgctaccctcaacgttacgcggcggatcctgttgcagacgagctacaatcaaatcttgctcgtaaataatgcgaccgtcatccagcccttgttcacggttgaggattttcattaacgtcgatttgcctgcgccgttgcggcctaccagacaaacacgttcattatcttcgatatgcagttctgcgttatcgagaagcggcgcgtcgctgaacgacagccaggcgccatgcatactgattaatgacattactattcctttcaggctgcggtaatcagccagcagttgtggatctggcggttacgggcgaaatcctgggagagcgttttttgcgtaatttcttgtgctttcagtcccagttttgccaggccgacgagatccatacggaagccacgtttgttgttcgagaacatgatcgtcccacctgcacgcagcagacgtttcaaatctttcatcagcgccagatgatcgcgctgaacatcaaacgcatcttccattcgttttgagttagagaaggttggcggatcgataaagatcagatcgaactgttcatttgcctcacgcagccacgccaggcaatcggcctgaatcaggcgatgcgcacgcccggtcaggccattcagacgcaggttgcgttctgcccactccagataagtacgcgacatatccacggtggtggtgctgcgtgcaccgcctaatcccgcatgcacggtggcgctgccggtataagagaacaggttgaggaaatctttgcctttgctcatctggccgagcatacgacgggcgatacggtgatcgagaaacagaccggtatcgaggtaatccgtcaggttcaccaacaagtgagcgttatattcggtaacttcaagaaactcgcccttctcgcccagtttctggtactgatttttgcccttctggcgttcacgggttttcagcaccagtttgtttggcgcaatccccagtaccgaaatggttgcagcgataatatcgaacagacgctgacgcgctttgtgagcatcaatagtttttggcggcgcatactcctgcaccaccacccagtcggcataacggtcaacggcaacgttatattccggtagatcggcgtcatacaggcggtaacattcaattccttcctggcgagcccacttctcgaattttttgaggttcttacgcaggcggttggcgtagtcttccgctaccatcgccggtttgctgtctggagtgctttcggcaacgtggtaatttttctgtacgcagtccagcgggccgtttttcgccttgtactgtttgtctgcacgcagctgcaagcagcttagcagatccggcgaggcactaaacaaagagagattccagccaccaaactggtttttcatgatccgacccagcaggctatgcagcgcaatcagcgccggttcgctgtccagacgttccccgtatggcgggttgctcaacactgtgccgtacggccctttcggcagcggattggtcagttgcgcgacatctttcacctcaaaggtgatcagttcaccaatccccgcaagacgggcgttagtgcgtgcacgttgaatcacccgtgcgtcgctgtccgaaccgtaaaaatgagagctatactcagccaggcctttacgggcgcgagtttgcgcttccgctttcacttcctgccagatagcttcatcatgctgcgcccagccgctaaagccccaacgcccacggtgcaagcctggtgcgcgatcggtcgccagcatcgccgcttcaatcagcaacgtaccggaaccacacatcggatcgagcagcggtgttcctggctgccagccggatcgcatcacaatagcggctgccagggtttctttgatcggcgcaataccagcacgatcgcgatagccacgcagatgtaaaccatcaccactcagatcaagagcgatactggcggtttctttatgcagccagacgttaacgcggatatccggcgcatcgcgatcaacatttggacgcggcagatttttccgcgtgaaagcatcgacgatcgcgtctttcactttcatcgcgccgtactgactgttgcggatggtgtcattcaaaccactgaagtggacagcgaaggtcgcgccaggattaaacatctctgtccagttgatcgcctgaacaccgagatagaggtctaaatcgctgtaaaccttacactcgcccagcggcaacataatacgcgaggccaggcggctccacatcaggctctggtaaacaagccgtgtgtcgcccttgaaatggaccccaccctgaaccacctggcattcaacggcccccaggttttccagttcagtttttaacagctcttccagcccacgggccgtactggcaaacagagaattcatatcgtcacttttactctaagagcctaccgcagtaggcgtaattgttgcagtcagtctggacatggacagcgcggagaaaccggagcgtacacaagtacgtgaggatttcgagcacaacccagggccaaactgacaaataaaatagcctaatgggacaggcgctaagaaaattgttgcgcattatagctaataagcgcgtcatgtcataaagttgagggcttattttcatttgaggaccgcaccgtggcgacattaacccggctttttattcatcctgttaaatcgatgcgcggcattggtcttacacatgctctggctgatgtcagtggtctggccttcgatcgcatctttatgatcacggaacctgacggtacgtttattaccgctcgccagtttccccagatggtacggtttactccttcacctgtgcatgatggcttgcatctcaccgcaccagatggcagtagcgcatatgttcgttttgctgatttcgccacacaagacgcaccaaccgaagtttggggcacacattttaccgcgcgaattgcgccagacgcgatcaacaaatggctaagtggatttttctcccgcgaagtgcaattacgctgggtggggccacaaatgacccggcgcgtgaaacgccacaacactgtacctctgtcatttgctgatggctatccttaccttcttgctaacgaagcctcgttacgtgatctccaacaacgttgtccggccagtgtaaaaatggagcaattccgccccaatctggtggtttccggcgcgtcagcctgggaagaagatcgctggaaagtgattcgcattggtgatgtggtgtttgatgtggttaaaccttgtagccgctgtattttcaccaccgtcagcccagaaaaagggcaaaaacatccggcaggcgaaccattaaaaacattgcaatctttccgcactgcccaggataacggcgatgtcgattttggtcagaatttaattgcccgtaatagcggcgtgattcgcgttggcgatgaggtggaaattctggcaacggctccggcaaaaatttacggcgcagctgccgctgatgataccgccaacatcacgcaacaaccggacgcaaatgtagatattgactggcagggacaggcatttcgtggaaataaccaacaggtgttgctggagcaattagaaaatcagggaattcgtatcccttattcttgccgcgcgggcatttgtggaagttgccgtgttcagcttttagaaggcgaagtcacgccgctgaaaaaatcagcaatgggcgatgatggcaccattctttgctgtagctgtgtaccgaagactgcacttaagttggcgcgttagactgcctgttcgaggctgaagctgtcaacattaacctgcggtttcagcctgtcgttcatgattttcatggcgtcgcccaactgcatcgcgcgacccgcaataacaacgcagggttgtgccagcaggcatagtgcggcattttcgccagattcaacgaccagcaaattgacctgctcgtgagtatcgctcaaccaaacgcaggccgcatcgcccggcatgggcacccacatttcaccatgggaaacaaaatgccagcttttcggcatttgcggtttgagatagcgaattgctaccagtgcattcagcaccagttcggctttttgttctttagataaattaaaatcgcggcacttttcttcaaaagagaaatagagcgcggcgtcgtcaacgcaaaagcctgcgggagaaaaggcatctggagtcaacatcttgcgcgcaaaacgtgagcgaaatagcataccattggctaaatcgagcatcattcgatcgtgctcttcatcgtaataccaacgccagttatcgtctggtttaattcgcatctgcctctcccctaccctataaaaccgcagcaacacaatccattgtcgcttcgcttaataacctcaacaataaaagtacaaaatgtctaaataagcaacagcaatgaatataaaacaaccagggctgaaaataaagccctgattatcttataaagaggaattcgaagaaataattagatatgggtaacgatttctttaatcagcggcggacctttaaaaataaaaccagaataaatttgcaccagtgaggcacccgcagcaatcttttcacgcgcagcgataaccgagtcgatgccgccaacaccgatgatcggtaagcgaccgtttaattccagtgacaagcggcgaataatttcggtgctttttaactgaagcggacgaccacttaagccaccggtttgatcgcaatttttcattccctgaacaagagaacgatcgagtgtggtattggttgcaataacgccatcaatattatggcgaactaaactatcggcaacctggatcaattcttcttcagaaagatccggcgcgatcttcactgcgatcggcacatatttatggtgcatcgcttgcaaatcattttgcttatttttaatcgcggttaagagatcatccagcgcttcaccatattgcagcgtgcgtaatcctggggtattcggcgatgaaatattgatggcgatatatcccgcataggcatagattttttccatacaaatcagatagtcatctttgccctgctccactggcgtatctttatttttgccgatgttaatacccaggacgccgtcataatgggccttttttacgttctctacgaggttatcaacgccaagattattaaagcccatacggttgatcaaaccttcggcatctaccagacgaaagagacgcggcttgtcattacctggctgtggacgtggcgtgacggtaccgatctcgatcgatccaaatcccatcgcgcctaacgcgtcaatgcactccccgtctttatcaagaccggctgccagaccaagcggatttttaaacgtcaggcccatgcagttaacaggtttcgcaggcactttctgccgcaccagtgcttcaaacggcgttcctgtaatacggcgtaattgctgaaaagtaaactcatgagcgcgctctggatcgagctggaaaagggctttacgaacgaaggggtagtacatgaactctcctggattcccggtgtgcaaaccgggggcgtattatgtgcgagttcggaccaaaagggaattgacctgcggcaaaaaaaacgcaaacgttttccgaacctgtttcagggcagattttgctccttctttgcactcaacccgccgtaatcatttatcgcccgccaggcaacatgacactgtgctattacctgacaccagcttgtctgacgctggcttttaggtggcacaactcccgcattacttaacgctttaccatttacgctcacctgaatcaggttaatgtagtaaggcgttgggttagtgagttgcacaccctgcgaattccgtgtccagcgtaattgttgataagcttccagcgggtcgcccggcaaaccttcgggtcgccagaacagtttaaataccgagcgcatcgccacttttacgctctgattttcaactttgccggatggcacgctggcaatgcttaactcaaatagcgtttcgcgatccactggcaagatgtcgctttccgttctcagcaagcgcaacgtgcccgtagtaccgggcttcaggagaataagcggtggagcggccagtaatggtgctggcactgtcgacacttcccccccggcccaacgcgttgggcgattgattttactgttaataagccaggattcctgactggtattagtcagtaaaatagctatcgattctttgtctgccggaaagataaatcgcgttccgccgaccaccactcctgcctgcaattcacccgccaccagcagcgataaaacggcaaaaatcaagagcgccaatctgttccacgtattagtcataatgaagtacaaatgtcgcgctggcattcactttacccgactgcacatcactattgacaggtcgtaattgcgcataaaaagttaatggcaccttaccgctgtgtaggctgtagtctttactcgcctggttaagcggaatcaatatcttcgcatcatccagaatcgcannnnnnnnnnccgctggctgcatccataccactttcaatggacagcatttcgctctgcactccgtcggggattcctgaaaaggtgacgtcaaccgtgctgacatctgttccgcaatcctgcaaattaatgatgaaagatttctccgggccataattcccatgaaaaaaacgtgtcagtgagacatcgcctaactgcacattgatttgcttgctatcctgtgccagcacgcatgtattacgacgaaacgatccgctaatgttgaccgtgccatcatgagcaaataactcactactccccgttaatcccagtaagcacagaatccagattatccgtttcaacatcactccttcactggtaaaccagatcaaaatagagaaccgccgtcgcattaccgcccgttgctcccgcctttgtggacttataacgaagttgatatttgagtgtgttatccccggcttttaagggcgtaagaggctggacctgattgagcgggatttcttgctgactttgcgcatcaagaatttgcacggcaatccccgttgccataccaccgcttccgcctgtgtcagttagtttaagcagtgtcggcgcaagggtgtcagcctcgccgctaaaaaggacgtccgcgccagtaataccagcggcacaaccggtgatatcgatattcaaatcagcagcagtgcttacggtattcgcggcctgaaaatcactgatattaaaatcaccaatatgaatattttgtaatgcacttttggtggcgacatcacagccctgatcgaccacattcccataaatatgcatactaacttgttcaggcccagccatcccgacatggatgttaagaatgctaaagaacaagataacgcactgaaatatcgtttttttcttcatacgttcacgcgttaatcaaaatttattctcaccgttgccgtggcttcaaatcgcccggtttctggtggtacacctgtcgtgctgactggatagacattcattcgcgcgatactgtctgcatcatcaggaatagagagcggtaatgttccaccagcaggggaaataatgttgttctggctatcggtcaccaccacgcccacgccaggacgtgacgtcttaatcgcctggggatagctggggtctgtggttgccgtcagactcaggttgacgttaactaaccccgcgtttcccgtgttacacctgactggaattgcaagttctgccgttctggccccaagaggcttatgccctacaacacgaaagttagccgcaaatacgtcgcccagatcgacctcgattgtttctccggcattgacggaacatgagccaagtgaattgatcgtaccagacaggtaatacactaaaaccggtgtacctgtagtcgtgcaggaatcacctgcgggtatgttgtagcattcaaataatcgcgccagcgccataggaggaatgacgaccgaaccaacgaacggctgcaatattttcagggaaaagctaccgctattaccgctagccccctggccacctaaacgttgaccgccgggatcgcaaatatgccatcgtgtatctgcccctgtgcccacgttttcgaaaggaaccgcagtaggagaactgcctttaacctgcaataaaactttggcggcaagatagtcattaattttgtaccagttgtcgcctaaatagactaacggtgaatccgcggcgaatgcccatcggccacttctgacattgtctttatcgcaatcacaggaaacataataatcattcgattcgttccactgataaaatttgtctttaactactccagccgtattttcttcttcctccagggttttaacgccaaaattgacgccaatatacggattcccctgagtggtatgacactgcccgctataagcagcagtttgagcgcaccatagcattaagacggcggcaaaaaatagtcgtagtaataacacgcatttttctccaaagattatctgcatatggcatccattcgcgtaatcgcagagttaatttgttgttcggtaagctggtaactgatatgacaaatttgatcgggagcttcgccccagcgtacagttatcgccctctgagcgtgcaaaccggacatatagagcgagccatcatcatcaataatgccgctattagtctgtatgccgtccagcgtcgctatcgcgccaaaacgcagcggtataccctgctttgatgttttcattaatacccttgctcccgcatgggcattgaactccgccagaaccaacgcccctttggtgggaaccacgttgactactgcattttcaagatccacgttacgttttaacgatgccgcatcaagtgcgattcgattttcccgataagaagtggcataggggacaacggtatatccgcgccagtcagttttcagcccggtgctgttcgccacacgagtattctctgcgcctggtgctgcaatcagcacgttagtttcccccagcgattgccccagggtaatgccctgtgaatgggcaactaaactgcctgaaagagcgtagttcagttgttgttgactgccgttatcgctgtagttgtagcccactcgggcatctgcaaacgcccctttgtagtccatgctggcgctaccattagccgttttcccctcgctgttatatccctgttgcacgctgtagctcaggttaccgtcatcgagtagtgtctccgttaaacccaggttttgtgtaatgtgcccttcgttatcgatactggtgttagaggtcatccaggcgtaattttttttcctggtatagctatcattacttctggggagcaacagattgagcggcagggaaaaatttagtgcaaacacctgatcagcatcaggttgaccacgggacttactgtagttccaggaaacccccagcgagagatctttaatttgcgtgttgtagccaaactgtaatagccgatcctgttgatcggtatgccagtaagtttgctggctaccacttaaataaaacgaaccgtactcgcctaattgctgggagatattgacctgcagtttgccacgtttggtgtaaaacaaattgtaataacgcgaccacatcggcgtatcttcatcatcaccgtcattaaattcgtagccatccatatgtttatacatggtgtcggaaagggtgtagaaacccgacgtcgaatagcgatagcccatcaattgaaagttagtgcccaagtggttgagcgttttggcatacagaaaacgatatgactgacctttatgttcgctttgatctgccagcgtactcttcgcctgggtcgcatcgaacgaaattgctccgaaatcgccgaggttaaatcccagaccaaacatggcggcacggtaatattcagcatattgtccaccaccataccaggtcgttccccacggtccgccccactgcaacgtggcctgggcaaatttgctctcctgctgttcattactattggttctgtatttcgccagtgtcaccgcgtatttgattcgcccctgacgctggagtaatggcacgctggaaaacggtacgctgtagctat

SEQ ID NO: 254 - DNA, 17129 bp, Escherichia coli
  source 1..17129: mol_type = genomic DNA
aaatacagccataacatcgtaggttctcagtgaaccattttcaggataactttctatgaaagtaaacttaatacttttcagcttatttttattggtctctattatggcatgcaatgtttttgcattttccatttctggtggtgtaagtgagaggagctataaagagactgaaaaaacatcagcgatgacgaccacacactctacaaaacttcagccatcacaggcgattttgtttaagatgagagaagatgcgccaccattaaacctcacagaagaaatcacgcctacttatccgacaaaggcgaattatcttattcatcctgtgcgatagcgtctgtcacatggcaggtgaacaatcatgtctgatgctgatgtgaacacctgcccaaatgagccatcctgacccactatcgcctgccataccccaccataaagcgaatcatcaagccacaagccggggcaagaaacataaatatccccgtcactagttcattaccgccagttaaccacatggtgaagtaataaatgagtgcagcgaggatcaccatgccgaagaaagaagagaccgccgataccacgttcagtacctgaccgatgtagccgcttacgcagacaatacacagggcgagaaacatccataaataaatcatagctcaacctcctgccgcgctaaaaaacctgtaacttcagtcactttaatagtaagacaatccttaacctctggcaatttttgctaagcatcaatgaaaacagcatgttaaatgcaagactgttgtgtacggaaaaatatttactttgcacgattaataatcagtagctgaaagcagtcagcgagtgataaagtacagataccgcattcatgctcctcgtggttatgtcctgactagtctttacactctttacaggaaccattgtcgtacatgatggcccaaccaattgagtgtaccgctgtcgacatggaatcttctgcgatacaacaattcgtatctacagaaggtaactatgtttccacaatgcaaattttcccgcgagtttctacatcctcgctactggctcacatggtttgggcttggtgtactctggctttgggtacagcttccttatcctgttctctgctttctcggcacgcgtattggcgcaatggcgcgaccattcctgaaacgtcgtgaatctatcgcccgtaaaaacctggaactttgtttcccgcagcattctgcggaagaacgcgagaagatgattgccgaaaactttcgttcactcggcatggcgctggtagaaaccggcatggcatggttctggcccgacagtcgcgtacgtaaatggtttgatgttgaagggttggataaccttaaacgcgcacaaatgcaaaatcgcggcgtaatggttgtcggcgtccattttatgtcgctggaactgggcggccgcgtgatgggactgtgccaaccaatgatggctacctatcgtccacataataatcagctgatggaatgggtgcagacccgtgggcgcatgcgctctaacaaagcgatgatcggcagaaataatctgcgcggcattgtcggtgcactgaagaaaggtgaagcggtatggtttgctcccgatcaggattatggtcgtaaaggcagctccttcgcgccgttctttgcggtggaaaatgtcgccacaaccaatggcacctatgttctctcccgtctctctggcgcagccatgttgaccgtaacgatggtaagaaaagcggattacagcggatatcgtttgttcatcaccccagagatggaaggctacccgacagatgaaaatcaagccgctgcctatatgaacaagattatcgagaaagagatcatgcgcgcaccggagcagtacctctggatccaccgtcgctttaaaacgcgcccggtgggagaatcgtcgttgtacatttaacaaactgctcttnnnnnnnnnntcaaatcggccataataacctcatggtttttatggcttttttcttaaggttttttccttcgctgaatatctaattattaccgtcagaaattaaactgtcgccgatatgagacacttgtaagttactaaaagtaaataagaaaatgtctcttgtctcgtttcagttttaggcgtacattagcgccgtctcgagcagtttagctcagaattctggggtgatgcccacggtaaaatacagggcttttaaggtcgctttgcccggtgtcaactcactgtatcaggtgtaatgaagtcattcaggcgtaacagtaattacgcggagagatgtaaagtgaaatatttctttatgggcatttcatttatggtcatcgtttgggccggtacttttgccctgatgatctaaaagcaaactgtgcaatgaaaaacaggagccatcaggctcctgtttgcatttctgacgacggtgtttattccgcgttttcgtgaatatgtttgctgctggcgggtagtaaaccgtcggcacggaacatcgctttaatcccacgaatcgcctgacgaatacggtcgcggttttcaatcagtgcaaagcgaacatgcgtatcaccatagtcgccaaagccaatccccggcgagacacaaaccttcgcttcgttaaggagcttcttggcaaattccagcgatcccatggccgcatatggttccgggattttcgcccagacatacatcgaagccttcggcatttcaaccatccagcccgcttcatgcagccctttaaccaatacatcacggcggcgtttgtactgttcggcaatgtcgcgcacgcactgttgatcgccctccagcgccgcaatcgccgccacctgcaacggcgtaaaggtgccgtaatcgtgatagcttttaatacgagccagggcgctgaccagcgttttgttgccaaccataaagccgatacgccagcccgccatgttgtagcttttcgacagcgtaaagaactcgactgccacatcgcgtgcacccggtacctgcatgattgacggcgctttccagccatcgtagacgatatcggcataggccaggtcgtggaccaccagcacatcgtagcgtttcgccagcgccacaaccttttcgaagaactccagctccacgcattgcgcggttggattcgacgggaagccgaggatcatcatcttcggtttcggataactttcacgaatggcgcgctccagttcgttgaagaaatcgacaccttccaccagcggcactgagcgtacctgcgccccggcaatcaccgcgccataaatatggatcgggtaacttggattcggcaccagcaccgtgtcaccatgatccagcgtcgccagcatcagatgcgccaggccctctttcgaaccaatagtgacgatggcttctgattccgggtcgatttcaacgtcgtagcgatcctgataccagcgggaaatggcgcgacgtaaccgcggaatgccgcgtgaagtggagtaaccatgcgtgtccgggcgctgggccacagtacataatttttcgacgatatgcggcggagtcgcaccgtccgggttacccatgctgaaatcgataatatcttcgccgcgccgacgcgcagccattttcagttcagcggtgatgttaaaaacgtagggcgggagacgatcaatgcgcgtaaagcgacgttcagggcgagtgtcagccataatttcctcagattaacgttagcgcccggaccgtccgagcgacgctgccacaatggtggctgttttgaaaatagcctgattaatttctgtctgtccagcgttttagaacatttttatcaatggctttaaatgaggaactccacttcaaaaacaggaaatttttctacgctaacaagaaaattaccaccaattttattaacattataatttcaataaatttaccagccagaagtgcattatcaagagatacattgctaatacaccatttatctttcaatccccttttaaatttatggtttttcctcaaaaacggcctgctggtcatcagccttcaggttacctatcatagaggtttaatccttattcagagtcacccgtgcacgaaatattcaacatgctgctggcggtcttcgatcgggcagcgttaatgcttatctgcctgttctttctcatccgtatccgcctgtttcgcgaactgttgcacaagtcggcgcactccccaaaagaattgctcgccgttaccgccattttctcgctgttcgccctgttcagcacctggtccggcgttcccgtagaaggctcgctggtgaacgtacgtattatcgcggtgatgtccggcgggattctgtttggcccgtgggtaggcatcattaccggcgtgattgcgggtattcaccggtatttaattgatatcggcggcgtgacggcgatcccctgctttatcaccagcattctggcgggttgtatatcgggctggatcaacctgaaaatccccaaagcacagcgctggcgcgtcggtattctcggcggcatgttgtgtgagacgttgaccatgattctggtaattgtctgggcaccaactaccgcgttggggatcgatatcgtctctaaaatcggcattccaatgatcctcggtagcgtctgtatcggctttattgtgcttctggtgcaaagcgttgagggcgaaaaagaggccagcgccgcgcggcaggccaagctggcgctggatatcgccaacaaaacgctaccgctgtttcgccatgtcaatagcgagtcattacgcaaggtctgcgaaattatccgcgatgacattcacgccgatgcggtggcaattaccaataccgatcatgtgctggcctatgttggcgtgggtgaacataactatcagaatggcgatgacttcattagcccgactacccgtcaggcgatgaattacggaaaaatcnnnnnnnnnnattaaaaacaatgatgaagcccaccgcacaccagagattcattccatgctggtgatcccattgtgggagaaaggggtcgtgaccggaacgctgaaaatttactactgccacgcgcatcagatcacctcgtcattacaggaaatggcggtcggtctgtcgcaaatcatctccacgcaactggaggtttcacgcgccgagcagctacgtgaaatggcaaataaggcagagcttcgcgccctgcaaagcaaaattaatccccattttctgtttaacgctctgaacgctatttcatcgtcaatccgtctgaatccggataccgctcgccagttgatctttaatctgtcgcgttatctgcgctataacattgaattaaaagacgatgagcaaatcgatatcaaaaaagagctgtatcaaattaaagactatattgccattgagcaggcccgctttggtgacaagctgacggttatctatgatattgatgaagaggtgaattgctgcattcccagcctgctgatccagccgttggtggagaacgccattgtccacggtattcagccttgcaaaggtaaaggcgttgtcaccatcagcgttgcagagtgcggaaatcgggtacgcattgcggtgcgagataccgggcacggcatcgatccaaaggtgattgagcgggtcgaagcgaatgaaatgccgggcaataaaattggcctgctgaatgtccatcatcgcgtgaagttattgtatggcgaggggctgcatatccgccgcctggagccggggacggaaattgcgttttacattcctaaccaacgcaccccagtcgcctcacaggctacgttattgctttgagccggagtgatattgtgaaagtcatcattgttgaagacgaattcctggcacaacaggaactgagctggctaattaaagagcacagccagatggagattgtcggcacctttgacgacggtctggacgtgttgaagtttttgcagcataaccgcgtcgacgccatttttctggatatcaatattccgtcgctggatggcgtgttgctggcgcaaaacatcagccagttcgcccataaaccgtttattgtgttcatcaccgcgtggaaagaacatgcggtagaagcgtttgaactggaggcgtttgactacattctcaaaccgtatcaggagtcacgtattaccgggatgctgcaaaaactggannnnnnnnnncaacagcagaccagcagtacgcctgccgcgacggtaacgcgtgagaatgacaccattaatctggtgaaagatgagcgaataatcgtcacgccaattaacgatatctattacgccgaagcgcacgagaaaatgacctttgtctatacgcggcgtgaatcctacgtaatgccgatgaacattaccgaattttgcagcaaactgccgccgtcgcattttttccgctgccatcgctcattttgtgtcaatctgaacaaaatacgcgaaatcgaaccgtggtttaataacacctacattctgcgactgaaagatctggattttgaagtgccggtcagccgcagcaaagtgaaagaatttcgccagttaatgcatctttaatcgggaactttcatgaaagcaccaggcttgcccgccgatcaacaatttttcgccgatctgttcagcggcctggtgcttaacccgcaactactggggcgcgtctggtttgccagccagcctgcctcgttaccggtgggcagtttatgtattgattttccccgtctggatatcgtgctgcgcggcgaatacggcaacctgctggaagcaaagcagcagcgaatggtggaaggagaaatgctgtttattccggcacgcgcggctaatttaccgatcaacaacaaaccggtgatgctgttaagcctggtgttcgcaccgacctggcttgggttatcgttttacgatagccgcaccacgtcgttgttgcatcctgctcgccagatccagcttcccagcctgcaacgcggtgaaggtgaagcgatgcttaccgccctcacccatcttagccgttcgccgctggagcagaatatcattcagccactggtgttaagtttgctgcatctttgccgcaacgtggtgaatatgccgccgggtaattcgcaaccgcgcggcgattttctctatcacagcatttgtaactgggttcaggataattatgcccagccgctcacccgcgagagcgtggcgcagttttttaatatcacgcccaatcatctgtcaaaactgtttgctcagcatggaacgatgcgttttatcgagtatgtgcgttgggtgcgaatggcgaaggcgaggatgattttgcagaaatatcatctgtcaattcatgaagtggcacagcgttgcggttttccggacagcgactatttttgtcgcgttttccggcgtcagtttggtctgacgccgggagagtacagcgcccgttttcagggctaacgtcagaaggttaattccgtttccagcagcgtcaggatgctttgcgcatcttgcgcggcaaacaatgactggcggaagtttttattcaccagtttacgcgccagctgcgagaagactttcacatggttcatcccttcgttagcacccaacgtcagcatgatcaccagttcgacttcgcccatctctgactgccagtcaaccggtttcaccagccgggcaatgctgatactggaatgacggatccactgagatttggtgtgcgggatcgccacgccaaaaccaacgccggtagtgacaatctcttcccgctgccagacatcttcttccagctcaaacggatgttcagtgcgcccgttaacgccgaggttgccgcacaggaactggatcgcctgctctttattgctaaaatcctgatcaacaaagatattctccagcgccagcagtgggcgaacgtcttcttccggcgtaaaggcggtgagtaacgcttcaatttcctgcgcactgcggcattcacatgcctgacgcgccagttcccgacacgcctcgctatccagttgacgaagctggcttttcaccgccggaatacgcgggctactcatactcagctcatccaggcccagcccaagcagtagcggcagataacggctttcaccgcccagttcaccgcaaatgcctacccatttgccccgctgatgcgcagtggtaacaatctgctgcaacatgcgcaggaacgatggcgtaatcgggttatacagcggcgatacgcgcgggttattacgatcgaccgcatacagatactgggtcatatcgttggagccgatactgaagaaatcgacctcatcgcagaagtgatcgatgatgtagcacaccgacggcacttccaccatgatccccagcgtaatcgtctctgcatgacgcaggccatcgcgcttaagctcaacgatcgctttttggatctcgcccttcacccataagatctgatcgagactgtggaccatcgggatcatcaactgggcgttgccaaaactggcggcgcgcaaaatcgcccgtagttgagtgcggaacaggccagcaaattccgggtaaatacgtaccgcgcgatagccgaggaacgggttctcttcctggggaatattcagataaggaatgcttttatcgccaccgatgtccattgtgcggaagataatcggcttgtcgcccgctgccagtagtacctgctggtaggcttcaaattgctcctgctcgtccggcgcgctgtcacgatccatatacagcatttcagtacggaacagtccaacgccttccgcgccgttggcaaacgcgcctggcgcttccagagcggtgccgatattcgccgcaatatcaatacgcttgttatcacgggaataggccagctgcgcggcggcctgcgcctgttgtttttggcgtttatccgccagcgtctgtgcgacctgataataaccgctcaccgcgtcattcgggttaatcgccagcacgccgcactgggcgtcaagcaccgccggttgcccggcataacgggcaatcgcatccagcggcaggccgctcagtaccgggatcgccgaggcgcgggccagaatcagggtatgcgaggtgcgcccagttttctccagaatcatgcctgcaagattttttaaatcgaggctcaaaaactggcttggggttaaatcctcggctaccagaatagtcggtttttccagcaccagattgttgcgcggcttcagttccggccaggtgatatgcagcaactgttcgctaatatcgcgaatgtcgctaacacgttcgcgcagataatcactggcagaagcagaaagtttggcgcaaacctgctccatattgctgatgatcgccgcccccagcccttgatgctgttctgtcatcagacgacggatattgcccgcgaattcatcatcctgaatcagcgacaaatgggcgctgaggatagttttgctttcgccgtcacgctcacgcaattgctggttcagttgctcggcaagcgttgccaggctgtgctccagccgggtggaatcttgcgcactggcggggattgcccgataactgtcgaggctgtcgctttgtaacagggtcagcgtacccacgccgacgccgcttgccagcacattgccgtacagtaaatccgggttaaggcggcttaatgaacgcggcagcggatgcgccgtcagttctgcctgcgtcggctgaacgctgtcgctgtcgataaagcgcaccaggatgtattcttccagcacgcgccgcgcctgctcttcatcgctgccgctaatgttcaggctgcaactgtcattaaataaggtgccagttccaatcaacgccagcgagcttttagcatcggcctttgcgttctggcgatggttgaaaaaggtgatttcgctttgccactggctgcactgttctttaagttcccacgccggacgagcatgtagaccgttaggcaaaggacagagaaattgaatcgttaacataaccgctccgggttaatcaggagatcatctgaaatccgtcagttgaacaaccgtctcacgcgtaagacgttgaataagggcagataaaagttgctccatctgcaaaatgtcgcggcaatcggcaatcgatgccgcgcaatgtccgtggcgggtggcaggccccattaccactgtgggtacgccagtaccggttaagtgcaccgctccgccgtccgtgccgccgttgctgaacatatctgcctgcaacggtacgccaatttcagccgccacggtttcgatccaggcggtaagttttggcggcgcaatcagtgacttgtcgcttaacaccagcatcgggccgttaccaatctggcgatggttagccgcgccataatcaaagtttttcgcccagcaggcggtatccagcacaatggcgacgtccggcgacaccgcgcgggtagcggtttgcccaccgcgtaatcccacctcttcgctggaacttgccaccagccacacctccgcaggcagttcggcatcgtgcagctcacgtagtaacgtcaccagcagatagcaaccgaggcgatcatcaaaggctttccccatcacccgctggtgagggagaacctgaaaagttgtatcaaaggtgacgcgatcgcctggacgaattcccgcctgcatcacttcgtcatacgagcgcgcaccaatgtccacgcgcatggcgctgacgtcattcccctgccggtcgccgtcaagcaggcctggaattttgcactcttcacgggtggtgatgcgcaccggctgcagctggcgggcagccatgcgcacgttgccaaccggcagcacatcaattgccccttcgcgggagatgctacgcaccataaatcccacttcgtccatatgggcgcagatcatcaccttcggacctgtcgattcattgaggcggatcagcaccgatcccagaccatcaaatcgcacttctttttgcaggcgatccgcttcttccagcaggatctgccgcacttcctgttccgaggaggcgatcgcatctgcctcgctcaacgcttttaatagcgataaatccattatgcctctcccgtgagcaacactgttttcggcatggcgtagagcacttctgcgccttgcggggtaaccagcacaacatcttcgatgcgcacgcccccttgccctggcaaataaatccccggctccacggtcagtaacatgcctggctgtagcgtcgtggtgtcccgcggtgaaaaacgcggatcttcatgaacttcaatgccgatagcatgaccggtgttatgaccgaaatagtggctaaaacctgcctcggtaatcacttggcgcgcggcatcgtcaacctgctggcagcgcacgccggggcgaattgcagagattgctgcgagctgtgcctgcaggacaatctggtagacgttaaacagcgggtgagattcggcgctcaccccttcgccattcaccagcaaggtgcgcgtcatatcagagcagtagccctgatacagcgcaccaaaatcgagagtgacaaactcgcccgctgcaacaatcttgtcgctggctttgccgtgcggcagcgccccgcgccagccgctggcgacaatggtgtcaaaagaggctttttctgcgccctgctggcgcataaaccactccagttcagcggctatctcgcgctcgctcatccccgcctgaataaagcggcgaatatgctccgctccgcgatcggcaatcccacaggcgaggcggattatctccacctcctctggcgttttgatttgccgcagcacatccggcgtggcgctaaccagtttcgcattgagttcagacttccagcggtgcgcggtttcccaactcacctgctggccttcaaaaccgagcgtttgcaactgctcatcggcaatgatttgattgacgatagtggtaagcgtgttcgtcgcgtcaagcaaatgcagctggtagccttgcgcacgggcttccacctcaacgaaatagcgcgaatctaccagaatgtgcgcactttcacggctaataaccacatagcctgtccggtggagatccccagatgcggctgtttgttctgccgtgaggagagaagcactgcatccagttgttgcgccttaagccagtcgcgcagcgaagcgagtaatgtcatctggattttccttcttacaggctatcgattaacaatttgcctttacggaacatcatcagacgcaggaacaccaccatcagcgcagttatgactgcccccagcgcgatccccgccatatagacgcccaggttagtgaccagcggccatgcccagatagcggattccgggaaccattgcactgcgcccagccagacagcggcggttgagccgacaatcgcgccgaccatatacgacggaatggcggtgatgcggctttccagcgcaaacggaatcgcaccctcactaatccccataaaggcaaggaacatcgcggtcttaccctgcggataaagttgagcgttgaacaggcgtttgccggttaaacgacggtcaataatggtcgccagacccagaccaatcggaggaataacgatagcgatagaacgagcggtgaccggtaatacgtggtcagtggtaaagctgaaggcaacgaaacctgcggctttgttgatcgggccaccaaggtcgattgctgtcgccgcggcgatccccattgcgtacatcagcgcgcccttctcacctgcggcagtcagcacagtacggataccgccgttgatccagccaccaaagggggtgatgacgtagtacatcgccagcatgacaaaaatggcggaaagaatcggtagcaaaaatgtggttttgaacgctaacaggaaatccggtaactggattttctggttcatccacttcacaaggtaacccgcgacgatagaaataatcagcgcaccaatgaaggttgacggcaccggcgaagaggtcgcccattgcatagtgctgggatcgaagttcagcagttgcgtcggctgggtagacatcaacccgccgataaaaccagccgggaacgccagtttgccaccgatagagttcgccacaaaagcagcaaacatcggaatggcaaaaccaaacaacacgccgccgaaggactgcgacagccaggcaaatttaagtaaggagaggtcgaaaccggagaatttcccgctattaagagcatccatgatgccgatctcagcaggaattttaagccagctataagcaatcagctggctgaaagcgaggatcacaccgcccataattaaggttggcaccatgcgtgaaatccctgacatcacatgctgcgggagttcaccccagaagctgcttttagaggcctgcggattcttaactgccgctgccgcaccggatgcgccaggcacaacggttgcactgcgttttttaatggccataacaattatccctgtcgaatattactgttgttcagaggcaatcatctcttcgatttctttgatgatgcccgcagcgtttttaattgcgtcctgcaaagtgatttcataaacgtcgcgtgattcgaaacgctcattatcttccggggtaactgccacggagtggatgatgatggttgcttcggcgatatcctgcgccgtcaggcgattctggataccgtccgcgccctgggtttcaattttcacttcataaccggcttctaccgccgcttcttccaacgcctgagcggccataaaggtgtgagccaggcccattgggcaggcacataaggcaatcagtttcttactcatcgttaattcctcattcagtgatagttgacgagtgaaattatgaacgtgcaaaacaaatcgccgttaccagacaaataatgcatttactggagaattaatcccgctgtacggaagtgtgacgcaggtcggccttgtgaggggacacaaagaaaaattgaattaactgtatgatttaaaagattatcgggagagttacctcccgatataacaggaaggatttacagaatgtgacctaaggtctggcgtaaatgtgcaccggaaccgagaagacccggattgttatggacgatgagatacaccggaatatcatggacatattctttaaagcgtcctttatcttcaaatgcggcacggaaaccagaggctttgaagaactcaaggaagcgcggcacgataccgccagcaatataaaccccaccaaaggttcccagcgttaatgccagattgccgccaaaacggcccataatgacgcaaaacagcgacaacgcacggcggcaatcggtgcagctgtcagccagcgcgcgttcggtaatatcttttggcttgagattttctggcaggcggttgtcggctttaacaattgcgcgatacaaattcaccagcccaggaccagaaagcacgcgttccgccgaaacatgaccaatttccgcacgcaatatttcgaggataatggcctcttcttcactattcggcgcaaaatcaacgtgaccgccttcgcccggcaagcttacccaacgcttatcgacatggaccagatgcgcaaccccaagccctgttccggcaccgtaaaccgcaataggtttaccttcgaccggttctgcgccaccaaactgaatcagatgctcttttttcagcatcgggatcgccatcgatacagcggtaaaatcgttaataatttccagatggctaaaaccgagattctttttcatttcggcaattgagaacgcccaggtatggttggtcattgccacccagtcaccggtaattgggcaagcgatggcaatacagccgtctttcacctcgaccttatgttcttcaagataaacgcgaatgaccgcttcgaggctggggtaatcaagccctgaataggtcttagcctgcgagatttcaccactggcaatatcacacagagcaagacgtgcgttggtgccgcccacatcaccgactaatgcatactttgtcattcttcaactgctccgctaaagtcaaaataattctttctcacactgtaaatacctgggggcataacaacaacgccggaaaggcaggctccctgtaaatatcgatctgggtcacacatttactttatcgtttcagcaccaattgcagcgatgcctttttgcaagctgggcaaactaagtatctgaccccgcataaggaatagaacatgctccatccgcgagccagaaccatgttgttattatcgctccccgccgtggcaattgggattgcgtccagtcttattctgattgtggtgatgaaaatcgcctcggtattacagaatttgctctggcaacgactgccgggaactctggggatagcccaggattcacctctctggatcatcggtgtattaacgctaacgggtattgcggtggggttggttatccgtttcagccagggtcatgccggaccagaccccgcctgtgaaccgctgatcggcgcaccagttccgccctctgcgctaccaggacttatcgtagcattaattctcggtcttgctggcggcgtcagcctggggccggaacatccgatcatgaccgtcaatatcgcccttgcggttgccattggcgctcgtctgttaccgcgcgtcaaccgaatggagtggactattttagcctctgccggaaccatcggcgcgctgtttggtacacctgttgcggcggcgttgatattttcgcaaaccttaaatggcagtagtgaagttccgctatgggatcgtctttttgcgccattaatggcggcagcagctggtgcacttactaccggattatttttccatccccatttttcactgcccattgcgcattacggacagatggaaatgaccgatattctcagcggtgcaattgtcgcggcgattgccatcgcagcaggannnnnnnnnngtgcttaccacggttgcacgcgatgatgaatcaaatgaaaaatccggtgctcgtgctgggtattggcggatttattctcggtattctgggggttattggtggaccagtttcgctgtttaaagggctggatgagatgcagcagatggtggcaaatcaggctttcagcaccagcgattactttttgctggcggtaattaaacttgccgccctggtcgttgctgccgccagtggctttcgcggtgggcgaatcttcccggcagtgtttgtcggcgtggcattagggttgatgctgcatgagcacgtacccgccgtaccagcggcaataaccgtttcttgcgctattctcggcatcgtgctggtggtaacacgcgatggctggttaagtctttttatggcggcggtcgttgtacccaataccacattgctaccgctgctctgtatcgtcatgctcccggcatggctgttattagcaggtaagccgatgatgatggtcaatcgtccgaagcaacagccaccccacgataacgtttagcaaaaaatgctctcctttatgatttaagagttatggcgatgatacggggctttacctccccgtaatattgcgttaacaggccgctgacggcttcgatcgtgaaggagaataacaatgttcaggtcactgtttctggcggccgccctgatggcatttaccccgcttgcagcaaacgcaggtgaaatcaccctactgccatcaatcaaattacaaattggcgatcgcgatcattacggtaattactgggacggtggtcactggcgcgaccgtgactactggcatcgcaattatgagtggcgtaaaaaccgctggtggcgtcatgataatggctatcatcgtggctgggataagcgtaaagcgtatgagcgtggctatcgtgaaggctggcgcgatcgtgacgatcatcgcggaaaaggccgcggacatggacaccgccattaaacacattcgccaatggaacacaatgcctgatgcgacgctagcgcgtcttatcaggcctacaaaccggctctttaacgcgtagggcggataaggcgtttacgccgcatccgccaatagtgccagatgcgacgctcattcaactacaatcccagcgccgtccccaccaacaaccagatattcagcgccacgaccagcactacaatcacccagcctgtctgttttacgcgtttgctgttcaccagatcgcccatcaacttgctgtcactggtgaaaatcagcagtggaaccagcgccagggcgataccaaaacttaacagcacctgactcataaccagaatccgtgtcggatctaatcccatcagaatgacaataaatgacggcaacatggtgactgtacgacgcacccacagcgggatatggaagcgaatgaatccctgcatcaccacc

SEQ ID NO: 255 - DNA, 17083 bp, Escherichia coli
  source 1..17083: mol_type = genomic DNA
ttgctggatgagtttaaatctctccggcgctatttctccgtatcagtctccgtgccttataccgatgtctggatgcataaacccgttcagttctacccggggaaacatccgtgtgagaaaccggcggatatgctcaggcaaataatcaatgccagtagtcgaccaggtgatctggttgctgatttttttatgggctccggttccacaataaaagcagcaatggcgctggggcgtcgggccttaggtgttgagcttgagtcagagcggtttaaccagacagtgaaagagataaacgagctggtggggaaataatctggtggccacgtcaggtggcctttttatttccattacacagcacccgcatctgcgaggtggggttatgaaatccatggataagttaacaacgggtgtcgcctatggcacctcagcaggtagtgccgggtactggtttttacagttgctcgataaagtcacgccctcacagtgggcggcaataggtgtgctgggtagtctggtatttggcttgctgacgtatctgacaaacctttatttcaagattaaagaagacaagcgtaaggctgcacggggagagtaattcaatgactcaaaactatgaactgattgtgaaagggatccgcaattttgagaataaagttacggtaactgtagcgttacgggacaaaaaacgctttgacggtgaaatttttgacctggacatctcgctggaccgtgttgaaggtgccgcgctggagttttatgaggcagcagccagaaggagcatcagacaggtcttcctggatgttgctgccgggttatgtgaaggggatgagcagtcgccggaaaagcgccccgtaattttagatgcgcagaatgtgtggataacctacaaaggaaagctaccaggaagaattactggttctctgaagactcctccggaatcacaaccttaagtcactgaccggaacagataaacctgtccgtgggcagaaaccgataaatcctgataaatatccatgaacgcaaaaatcagatacggcctgtcggctgccgttctggcgctgattgctgcaggctcgtctgctcctcaaatacttgaccagtttctggatgaaaaagagggtaaccacactacggcataccgcgatggttccggtatatggaccatctgtcgtggtgccacaatggtggatggtaagcccgtcataccgggaatgaagctgtcgaaggaaaaatgcgaccaggttaacgctattgaacgtgataaggcgctggcatgggtggagcgcaatattaaagtaccactgaccgaaccacagaaagcgggtatagcgtcattttgtccctataacattggccccggtaagtgtttcccgtcgacgttttataagcggctgaatgccggtgatcgtaagagtgcatgcgaggcgattcgctggtggataaaagatggtgggcgcgattgccgcatacgttcaaataactgctatggacaggttattcgtcgtgaccaggaaagcgcattagcctgttgggggatagatcagtgagcagagtcgccgcgattatttatgctctggttatctgcatcatcgtctgcctgtcgtgggcggtcaatcattaccgtgataacgccatcgcctacaaagaacagcgtgataaaaaagtcagtgagctgaagcaggcgaccgccaccattactgacatgcagcaacgccagcgtgctgctgatgtactcgatgctaaatacacgaaggagttggctgatgcgaaagctgaaaatgatgctcttcggcgcaagcttgataatggtggtcgggtgctcgtcaaaggaaaatgctctgtgccatcctcagccgaaacctccagcgcctccggcatgggcaatgatgccaccgtcgaactctctccagttgctggacgaaacgttctcggtatccgggacggaatcatcagagaccagacagcactgagaacgcttcaggaatatatcaggacgcaatgccttcgatgatagcgataattttactcatcatccttcacatctggctctgtagacagggtggtgatcacttctggagtgaatccagattaaacatctcattgctgatgcttgaagttgagcatctggcgcgcggtaaggggctgcgttgaaataagagccagtcattacaaataccaggatttagcctcgtattcgcggggctttttattgccattacaaaagccactccctacagagtggctttgataatggcttataccctacacgggataacttaactgatatcccttttaacggataaaggtattcaagcctgacacatcatgcgctgtatcgtcgccgtattcccgtattaacagagaccgtagcccgacggggaactccttctgcgagagtgtgcgggaataatcaaaaacgatgcacaccgggtttttaccgcgtttatggttcgcgggtttgtccctcatgctcgccagtcctgtgcgggggtggaagaaacaggatactcacacagattcttgtgggcacgatgctattcctttctggattatcccgatgccattcatgcaaggcgctgtatcagacgttcgtcatggctgtcaggctgacgggtcctcccggtggggtggcctgccacggggcgggagcgtcgcggaaaaaggctagtttttgcatttttatcggccaccatcatctttgcatcttattgattattaatgattatttgttttatgtatgtcgaattgagtgttttttgttcgacatcgaacgcgttttcttaaagttgttcgcacgatgcatgtttaaagctctccggaggaaatatggatcatgagttgaaaaacctggtgctgaatattaatcaactggcggctttatctggtctgcaccgccagactgtcgtggcaagactgaaaaacattcgtcccgctggtggacatgacaaactcaagctataccggttgaccgatattctgactgaatttatggggttaccaccgccggttgctgagggcgaaatggatccacatgaacgcaaagcctggtatcagtctgaacgtgagcgtcttaagttcgaacaggaaacggcacaactcattccggccagtgatgtcagacgggagtttgccatctgggcaaaagcggtcgtgcaggtgctggagacattaccggatattctggaacgtgactgcggcctgcagcctgccgctgtgagccgtgttcagtccattattgatgatctgcgcgatcagatagccctgcgggtgaccgaagcaggtgcggatgatgaggaggaattacagcaggaggagtaatgctgaatcaggaaaccgcaaaggcagcacgaaccgattcaggttatatccttcgcgcaccgagacgaatgctggttgctgatgccgttgctcagtatatgcgggtgcccatgggggccgggaattcagtcccgtgggatccgctggtggcaccgtatgttattgagccgatgaactgcctggcctcgcgtgaatacgacgcagtgatatttgttggcccggcacgaactggcaagactatcggcctgattgacggctgggtgatttacaacgtgatttgcgatcctgctgatatgctgatcattcagatgacggaggaaaaagcccgcgaacactccaaaaaacgacttgccagaacgtttcgcgtcagcccggaagtggtcagtcgcctgagtccgaacaaaaatgacaacaacgtttatgacagaacattccttgctggcaactacctgaaaatcggctggccgtcagtcaatatcatgtcctcatcagattataaatgcgtggcgctgacggattatgaccgttttccggaagatattgatggcgagggggatgccttctctcttgcctcaaaacgtaccaccacatttatgtccagtggtatgacgctggtggagagttcccccggcagggatgtgaaggatgtgaaatggcgacggacttcaccgcatgaggctccaccaaccacggggatactgtcgctctataaccgtggcgatcgccgtcgctggtactggccctgtccacactgtggtgagtattttcagccctgcggcgatgtggttgctggtttccgtgatattgccgatcccgtgctggcaagtgaggcggcttatattcagtgtccttcctgttcaggacggattatgcctgaacaaaaacgtgagctgaacggacgtggggtctggttgcgggatggtgaatccatcaatgcggatggcagtcgttatggtgatccccgacgctcacgtattgcgtcattctggatggagggtccggcagctgcttaccagacactctcgcaactcgtttacaaactgcttactgcagaacaggaatacgagacaaccggaagtgaagaaacactcaagacggttatcaataccgactggggattaccttatcttccccgtgccagcatggagcaacgaaaaagtgaactgcttgagcagcgggcagagccagttccttcccgcagtgtgccggatggcgttaatttcctggtggcgacagttgatgtgcaggcgggacgtcatcgccgttttgtggttcaggtaacgggctatggcagccgtggcgaacgctggattattgatcgttacaacatcacgcagtcattgcgcggtggcagcgacggggagagccagcgaattgatccggccagctatccggaagactgggatgtcctgctgacggatgtttttcataaaagctggccgctggcctccgatccttctcaacaaatgcgactgatggcaatggcggtggactccggcggtgaagacggggtcactgataatgcctataaattctggcgtcgttgccgtcgtgatggccttggtaaacgtatttacctgtttaagggcgacagcatccggcgcgcaaaactgatcacccgtacattccctgataacaccggacgaacgggccgacgggcgcaggccgcaggtgatgtgccgctctggcttcttcagacggatgccctgaaagaccgggtgaataacgcgttatggcgtgactctccaggtcccggctatgtgcatttccctgactggctggggagctggttttacgacgaactgacgtatgaagagcggagtagtgacgggaaatggagtaagccgggtcgcggtgccaacgaagcttttgacctgatggtgtatgccgaggctctggtcattctgcatggatacgaaaagatccgctggccggatgcaccggagtgggcgagccgggaaacctggctggagtgtgtcccggacagtaccgaaccgtcaccctcaccggaaccggtatccacgcctgttaaaaaacaaaaacggaagaaaacagtaactgacgatgttaacccctggctgacttccggaggatggttatgaaccagaatgatatcgaagccatgattcagcgttatacggaagctgaaatggcggtgctggacggaaaatccgtcacctttaatggtcagcagatgaccatggaaaacttatctgagatccggcagggacggcaggagtgggagcgccgccttgcggctctgattacacgacgacgggggcatcccgggtaccggctggcgaggttctgatggcaattcttgatgatgtgattggcgttttttcaccaggatggaaagcggcaaggctgcgttcccgtgcggtgatccaggcttatgaggccgtaaaaacgacacggacacacaaagcccggcgggaaaaccgaactgccgaccagttaagccagtacggggccgtgtcgttacgtgagcaggcccgttaccttgataacaaccacgatctggttattggtgtatttgacaagctggaagaacgggtggtggggaaaaacgggattattgtcgagccacatccggtattacgcaatggggccattgcccgtgatctggcagcggagatacgcacccgatggagtgaatggtctgtcagtccggaggtcaccgggcagtttacccgtccgatgctggaacgtctgatgctgcgtacctggctgcgcgatggtgaggtgtttgcccagatggtttccgggcgcataaacagcctgacgccttctgccggtgttcatttctggctggaggcgctcgagccggactttattcccatgaccagtgatgagagcaacaggctgaatcagggcgtgtttgttgatgactgggggcgtcccgaaaaatatctggtgtataaaagccgtcccgtatccgggcggcagatggaaaccaaaaaagtggatgcagagcgaatgctgcatcttaaatttgttcgccgtctgcaccagatgcgcgggacgtctttgttgtccggtgtgctgatccgcctcagtgctctgaaagagtatgaagattctgagctgactgcagcaaggatcgccgctgctctggggatgtacatccggaaaggcgacggacagagctatgaaacggatggtaatgacagcaaggagaatgaacgcgagcttaccattcagccaggcattatttacgacgatctgaaacccggcgaagaaatcggaatggtgaagtcggatcgccccaatcctaaccttgaaacttttcgtaatggtcagttgcgtgctgtggctgcgggcagtcgtctgagtttttccagtacagcgcgcaactataacggcacttacagcgcccagcgtcaggagctggttgaatctactgatggctacctgatcctgcaggactggtttattggtgccgtcacccgcccgatgtaccgtgcctggctgaaacaggctgtggcatccggtgttatcaggctaccccgcgatctggaccgatcttcactgtataccgcggtgtattccggaccggtgatgccgtggattgaccctgttaaggaggctgaggcctggaaaattcagattcgtggtggagcggcgacagaatcagactgggtacgtgcaggtggtcgtaatccagatgatgtcaaacgtcggcgcaaggccgaaattgatgaaaaccgcaagctggatctggtatttgataccgatccggccagtgataaaggaggcagcagtgccgcaacgaaacgacaggagccgcagcacaccgacgaccagtccgaagaataattcctggttcaggatgcaggcaggtcaccagagtgacgcggatatttatatttatgacgagattggtttctggggtgttacggcgaagcagtttatcagtgatctgaatgcactgggcgatatcacccacattaatctccatattaattcaccgggtggcgatgtctttgaaggcatcgccatttttaatgcactgaaaacacatggtgcgtccattaccgtttatgtcgacggtgtggcggcgtcaatggcgtcggtcattgcgatggtgggaaacccggtcattatgccggaaaactccttcatgatgattcataaaccatttggctttacgggcggtgatgcggaggacatgcgcacctatgccgacctgctcgataaagttgaggcggttctgttacccgcttatgcacagaaaaccgggaaaaccaccgatgaaattgctgccatgctggcggatgagacctggatgtccggtgccgaatgtctggcacagggatttgctgatcaggtgacaccagccgttaaggcaatggcatgtattcagtcaaaacgtacagaggaatttaaaaagatgccggaatccattcgaaatatgattactccgccacgcaacagtgctccacgcgtacaggatgatggacctgcagcctcccggacgccagtgcaggcagcagcacccgtggtggatgaaaacagcatccgtgcgcaggtcctggcagagcaaaaagcgcgtgtaaacggtattaatgatctgtttgccatgtttggcgggcgttatcagtcgttgcaggctcagtgtcttgccgatcctgaatgttcgctggagcaggcccgcgaaaagctgttgaacgagatggggcgcgagtccacgccatccaataaaaataccccggctcatatttatgccggtaacggtaattttgtgggggacgggatccgccatgcgctgagggcgcgttccggatttgaaaaaaccgaacgtgataatgtctacaacgggatgaccctgcgtgaatatgcccgtatgtcactgactgaacggggtattggggtttccggttataacccgatgcagatggtcggtgcggcgttcacacacagtacgtctgacttcggtaatattctgctggatgttgcgaacaaagccattctgcagggctgggaagatgcccctgaaacctatgaacagtggacgcggaaaggtcagttgtctgattttaaaattgcccatcgtgtgggtatggggggcttcagtgctctgcgtcaggtgcgtgaaggggcggaatataaatacgtcaccaccggagataaacaggccactattgcactggcgacctatggcgagctgttcagtatcacccgtcaggccattatcaatgatgatctgaatatgctgaccgatgtcccgatgaagctgggccgtgcggcgaaatccactattgccgatctggtttatgccattctgacgtctaacccgaaaatctccacagataatgtaagtctgttcgataaagcgaaacatgcaaacgtactggagagcgctgcaatggacgtggcatcgctggataaagcccgccagttgatgcgcgttcagaaagagggggagcgtcatctgaatattcgtcctgcgttcgtactggtaccgacggcgatggagtctgttgctaaccaggtcattcgctcctcaagtgtcaagggggctgacattaacgccggtattattaacccggtgaaagattttgcgaccgttattgcagagcctcgtcttgatgataacagccagaccaccttctacctggctgcgtcaaaaggctccgatacgattgaagtggcttatctcaacggtgtggatacgccatatattgatcagatggagggcttcagtgtggatggcgtgacaacgaaagtgcgtattgacgccggtgtcgcgccagttgatcaccgcggtctggtgaaatgtacggcgtaaacgtcgcagacaacaactctgggggcgcgtaagggctttttttgtacctgaaatcagcccctgaacggggctgtgcggagacagttatggcaaagaattttgtagaagaaggaaaaacggtggcgattgttgccagtgcagccatcagcagcggagatctggtgcaggtgggtgatgtttttgcggtggcgctgaccgatattccacagggtgaaacaggcgacggcatgaccgaaggtgtgtttatgctgcctaagctgaaaacggatgacatgaaaacgggtaagaaggtttatctgaagtccggaaaagttcagctgactaacagcggctctgatccgctggtcggggttgtctgggcagatgccggaaccagtgcagaagaagtgccggtaaaactcaatgtctgatcccttttcccggctggcagcgcgtatggatgcgatcacggtcagaaagatgggaaagacagcctcgattaatgatgccgatatgactgtgatcccgggagaaacactggcagagctgaatgctctgtccggacctgcggtctctctggtggtgttttcttcgggataccgcccacggcgcggggatcgcgttgtttatgacggacaacaatggacggtcacacggcatgaacgttttaacggtaagccaatgatctttattgagtaaagaggtgtgggatgaaggggcttgagaatgccatccgcaatctgaacagccttgatacccgtatggtgccacaggcgagcgcatgggcgataaaccgtgtggcacagaaagcggtctcggttgccacccggcaggttgccgggaataccgttgcgggagataaccaggtgaaagggatccccctgaaactggtacgtcagcgtgtccgggtgtttaaagccagtccgtcaggaaaaatgacggccaggatccgcgttaaccggggcaatctgcccgccattaagctggggacagcccgggtcagactggcccggcgtggtggaaaactgcagtaccgtggcagtgtgctgaaggtgggtaaatatctttttcgggatgcgtttattcagcaactggcgaatggtcgctggcatgtgatgcggcgtattgatggcaaaaatcgttaccccattgatgtggtgaaaatcccgctgtccggaccgctgacacaggcatttgaagatgcccgcgaccgcatcattgctgcggaaatgccgaaacagctggggtatgcactgaaacaacaactgaggttatggctgacccgatgaaccgacatacacaaatccgccaggtcgtactggcacgccttcgggaacagtgtggagacagcgccacgttttttgacgggcttccggcatttgttgatgcgcaggaactgcctgccgtggcggtgtggctgagtgatgctcagtacaccggaaaaatgacggatgaagatgactggcaggctgttctgcatattgctgtcttcatccgggcacaggcaccggattcagagctggatatgtggatggagagcaccattttcccggccctgaatgatgtaccggcactttccggactcatcgacaccctgatcccactcggttttaactatcaacgtgataatgagatggccacctgggcgatggcggaaatcacgtaccagatcacgtacacgaattaaggaggtggcaatgaccacaccaaatccactggcaaaaacgaaaggtgcgggaacgacgttctggatgtacaccggcaagggcgatgcgtttgcgaaccctttatcggacactgactggctgcgtcttgcgatggtgaaggatctgcaacctggcgaaatgaccgctgatgcagaagatgacacttatctcgatgatgaagatgcagactggaaaacgacaacccaggggcagaaatccgtcggtgatacttcggcgacgctggcctggcgtccgggtgacagcgggcagaaaaaactggttcagttgttcgactccggtgaagtctgcgcgtttcgtatcaaatatcccaacggtactgttgatgttttccgtggctggctgagttcactgggtaaaaccattgcctcaaaagacgtgatgacccgcaccgtgaaaatcagcggtgtggggcgtccatatctggcagaggagggcactgaaactgtgggcgttaccgggctgacggtggcaccggcatccgccagtgtcaatgtgggagcaaccaccacgctgacctttacagtaaaacctgacggagccagtgacaaagcgatcagtgtgcattcgacagatccacagacagccactgtgaccctgaacggacttgtggccacggtgaaaggcgtgaagcagggcagcgtcagcattgtgggcatgacttctgacggcgattttgtggcagtggctacggtggctgtcagcgccgcaggttaacaggatgatactcatcatttgccccggttatccggggttttttgcaggtggagaatatgatgtttctgaaacagggcacgtttaattatgaaaaacagtccgtggtgctcagtgagctgtccgggctgcagagaattgaatatctggcgtttgttcagcagcgaacggcaaagtttgatgccggggagggagaactgccggaggctgaacgacagattgcttttctgcggatggggatggatatcaatgcctggctggtttcccgctcactgtggaatgcggatcagtctaaggatgtagagacgctttgcgcatccgttattacaacatggtcgtatgatgccctgggtgcgggggcggagatggttctgtcgctgagcggtatgggggccattgataatgccggggatgatgagcatgaggcgctgacgccggaaaagtcctgacgcgggaaatgcagtttgtcatgcggcttgcccgggagttccggcgggcagactggcggcggatgctgtcggaaatgtcggccactgagcttggtgagtggggcgattatttccggatgcagagcttcagtgatgtgtggatggatgcgcagtttgcctcgctgaaggcattgatcgtgagaatggtgtccggcagcagtgatgctgcggtggctgatttcagccttttaccggaagagaacgggataccggagcgaacggacgaagaactgatgcatcttggagaaggtatttccggaggtgtgcgttatggaccagatagccaacctggtcattgatttggggattgatgcggcagagtttaaaaatgaaattccccgtatcaaaaaccttctgaatggtgccgccagcgatgcagaacggtcttctgcccgtatgcagcgttttatggagcgtcagactcaggccgcccggcagacaacgcaggcggcttcttcggctgcaacagccgcctccgtccatgcgctgacggtggagaagaacgcacaggctcatgaacgcatggcccgcgaggtggagaaaacccgccagcgcatggaggcgctgagccagaaaatgcgcgatgaacaggcgcaggccatggctctggcggaggctcaggataaagcggctgctgcgttttatcgtcagattgacagtgtgaaacaggccagtgcggggctgcaggaattacagcgtattcagcagcagatccgacaggccagaaacagtggcgggattggtcagcaggattatctggcgctgatttctgaggttacggcgaaaacccgtgttcttacacaggctgaggaagaggctacccgacagaaagtggcgtttatccgtcagcttaaagagcaggcaacccgccagaatctttcttcttctgagttgcttcgtgctaaggctgcccagctgggggtaagcagtgctgcagaagtgtatatccgcaaaatggagcaggcaggaaaagccacgcattcgctgggtctgaaaagtgcagcggcccgccaggagataggcgttctgataggtgaactggctcgcggcaatttaggtgcgctgaggggatccgggataacgctggctaaccgtgccggatggatagacacactgatgtcaccgaaaggcatgatgcttggcggggttattggcggtattgccgcggccgtctatggtctgggtaaagcctggtatgacggtcagaaggagggggaagaatttaaccgccagttgtcgctgacggggcattatgccggagtcactgccgggcagctgtggacgctcagtcgtgctatttccgggaatggtatcacgcaacatgctgcagccggtgcgctggctcaggtggtggggagtggtgcatttcgtggaaacgatatcggtatggtggcgagagctgccgcacagatggagcgatcggttggccagtcggtcagcgataccataaatcagtttaagcggctgaaggatgatcctgtaaatgccgcgaaggctctggacaatgagctgcattttcttactgccactcagcttgagcagatacgcgtccttggggaacaggggcggtccagtgatgcggcacggatagccatgtctgcactggcagaggaaaccggtcggcgtactgcggatattgataataacctcaatgcgctgggcagtacgctgaagtatctgtctgatttatggagtcgtttctgggatgcggccatgaatattggtcgtgaagactcgctggatgaacagatttccgctttacaggagaaagtgtcgcgggcgaaaagactcccctggacggcatcatcttctcaggttgagtacgatcagcagcgtcttaacgagcttcaggagaaaaaacgccagaaggatttgcaggatgcaaaagagcaggcagagcggaattatcaggagcaacagaaacgacgtaatgctgaaaatgctgcactgaaccggatgaatgaaacggaagctgcacgacatcagcgtgaaattgcgcgtattaatgccatgcagtacgccgaccaggctgtcagggatgcggcgatacaacgtgaaaatgaacgttacgagaaagccctggcatccggtaagaaaaaaacacgcgaaacccgtaatgatgaggccacccggttattgctgcagtacagtcagcaacaggcacaggtggaagggcagattgctgctgcaagacagtcagcaggcattgccactgaaaagatgacagaagcgcataaacagcttctggctctgcagcagcgcatcagcgacctggacgggaaaaaactgacggcagatgaaaagagtgtgctggcccgtaaagatgaactgattcaggcactgacgctgctggatgtaaaacagcaggagcttcagaaacagacggcactcaacgagctgaagaaaaaaacaattcagctgaccagtcaactggctgaagaagagcgcgctcagcgtcagcaacatgacctggatatcgccacggtgggtatgggtgatcagcagaggcagcgatatcaggtacaactgagtcttcgccagaaataccagcaacagctggagcagttgaggcgggatagtgagcagaaagggacatataacacggatgactacagaaaggccgagcaggcgctgacggagagcctgaaccgacaactgaatgagaatcgccgttattggcaacagcttgaaattgctcagggtaactggaaaaacggtgctatgcgggcgtttcagaatttcacggcagatgcggataatgcggcaggcactgctgagcagatgcttacagcggcatttaacagtgcaggtaatgcactggcaacgttctgtactaccggaaaactgaacttcaaatcttttaccgcctcgctcctttctgatctggcaaaaatcatggctcagatgtccatgatgcaggcagttaaggggattggttcggcgtttggctgggggagtgcagcaactgccagtgtgacgcccaatgctgatggtggtgtttatcagtctgctgatttgagtcgctacagtggcacggtggttaaccgtccgacgttttttgcttttgcaaaaggtgcaggtgtgatgggggaagctgggcctgaagccattctgcctctgcgtcgtggtgctgacggtaagctgggggttgtggcggatattggtggttcaggtatggcgatgtttgccccgcagtacaacatcgagatcaataacgatggcacgaacgggcagataggtccggctgccctgaaggtggtttatgacctcgggaaaaaagcagcagcggactttatgcaacagcaggcccgtgatggtggtcggttaagtggagcatatcggtaatggagacgtttcactggaaagtgcgcccggatatgaatgtggtatcagagccgaaagtggtgacagtgaagcgggaagatggttgtgaacagagtagagcggcgggactgaataaccagttgtcgacttacagcgtgacaatacgtgttcgtaaatgtgaacacccatctttaaaagcctttctggaacggcacggtggcgtccgcgcatttcagtggacgccaccttatgactggaaaccgattagggtggtttgtcgtaaatggtcggcaagcgtgggggcgctgtgggtaaccataacggcagattttgaacaggtcgtggcataggaggctctgatgcaggatattccacaggaaacacatcatgagacgacacgcatcactcagtcagcccaggtggtgctctgggaaatcgatctgacagaggtcggtggtgaacgttattttttctgtaatgagcagaacgaaaaaggtgagccggttacctggcaggggcggcagtatcaggcataccccattcaggggacgggatttgaactgaacggcaagggcagtgctgcccgtccgacactgacggtttctaacctgcacggcatggtcaccgggatggcggaagacctgcagagtctggtcggcggaacggtggtcaggcgtaaggtttacgcccgttttctggatgcggtgaacttcgtcaacggaaacagcgacgccgatccggagcaggaggtgatcagccgctggcgcatcgagcagtgcagcgaactgagtgcggtcagtgcctcctttgtgttgtccacaccgacggaaacggatggcgctgtttttccgggacgtatcatgctggccaacacctgcacctggacctatcgcggtgatgagtgcggttatcacggtccggcagtcgcggatgaatatgaccagccgacgtccgatatcacgaaggataaatgcagcaaatgcctgagcggctgtaagtttcgcaataacgtcggcaactttggcggcttcctttccattaacaaactttcgcagtaatcccatgacagagacagaatcagcgattctggcgcacgcccggcgatgtgcgccagcggagtcgtgcggcttcgtggtgagaactccggagggggaaagatattttccctgcgtgaatatctccggtgagccggaggagtatttccggatgtctccggaggactggctgcaggcagaaatgcagggtgagattgtggcgctggtccacagtcaccccggtggtctgccctggctgagtgaggccgatcggcggctgcaggtgcagagtgatttgccgtggtggctggtctgccggggggcgatttacaagttccgctgtgtgccacatcttaccgggcggcgctttgagcacggggtgacggactgttacacgctgttccgggatgcttaccatctggcggggattgagatgccggattttcatcgcgaggatgactggtggcgtaacggtcagaatctctatctggataatctggaggccacagggctgtatcaggtgccgttgtcagcggcgcagccgggcgatgtgctgctgtgctgttttggttcatcggtgccgaatcatgccgccatttactgtggtgacggcgagctgctgcaccatattcctgaacaactgagcaaacgagagaggtataccgacaaatggcagcgacgcacacactccctctggcgtcaccgggcatg

SEQ ID NO: 256 - DNA, 17031 bp, Escherichia coli
  source 1..17031: mol_type = genomic DNA
aaagcggcgaaagcagccgtagcgtaaaattcagggaaactcttttacaagccgctaacttttcgttagcggctttttttttgttcagcaacgcactaccatactttaaaccacagacaaaaggagttaccgatgaaattgttctacaaaccgggtgcctgctctctcgcttcccatatcaccctgcgtgagagcggaaaggattttaccctcgtcagtgtggatttaatgaaaaaacgtctcgaaaacggtgacgattactttgccgttaaccctaaggggcaggtgcctgcattgctgctggatgacggtactttgctgacggaaggcgtagcgattatgcagtatcttgccgacagcgtccccgaccgccagttgctggcaccggtaaacagtatttcccgctataaaaccatcgaatggctgaattacatcgccaccgagctgcataaaggtttcacacctctgtttcgccctgatacaccggaagagtacaaaccgacagttcgcgcgcagctggagaagaagctgcaatatgtgaacgaggcactgaaggatgagcactggatctgcgggcaaagatttacaattgctgatgcctatctgtttacggttctgcgctgggcatacgcggtgaaactgaatctggaagggtttgagcacattgcagcatttatgcaacgtatggctgaacgtccggaagtacaagacgcgctgtcagcggaaggcttaaagtaatagccatcggcccacaggtcgttgtgggccgaaatgagatatttcagagctttgttgcgctgaagtaatgttctggtttggcaatacgatcctgagcagccaccacttgcagctcatattcctgcattgctttggtggtcaccatgatttcgtagactgcagcggtcacatgttccagcgcctcctgcagcgttgccccctgaagcagtttcaccagcagtaaaccgctcgtcacatcaccaacacctaccggctggcgcataccaaaatccaccagcggacggctgatatgccaggcttcatcggcggtgaccagcagcatttcaaaacggtcacggctgtagccagctcgcgccaggtgtttaaccaacacaatttgtggcccttgcgcaatgagttcgcgcgctgccagaaccgcttcttcgacgttatttaccgcatgctcacagagtatttccagctcaaccagatttggcgcaatgatatcgctggcaggcaaaccgtgccgcacatgaaactctgcgacacccggtgcaacgatacagcctttttccggatgacccattaccggatcgcaaaaatatttcgcctgcggattcgcggctttcacctgacggacgataccgaggatatgttcaccctgctccgccgatcccagatagccacttaatacggcatcacaggtgtgtaatttatcaatggcggcaatgccttgcacaatttcggttaaatggctgggcggcatcacgcagccagtccatttgccgtattgggtgtgattagaaaattgaacggtgttcagcggccagacgttcgcgcccaggcggcgcatcggaaactctgccgcactgttacccgcatgaccataaacaacgtgagactggatagcgagaatatttttcatcatgttccctgtataaaaaccagggggagtgatttctcactccccctttccacttaatgcattatttccagcaaatcagacagtaattctttttaccgcgacgcagtaaggtaaaacgaccaaacagacgatcttcttctttaaagaagtattcaggatcggactgtttttcaccgttaatggtgatggcattggaggcgatagttttacgtgcctgaccacgggaaggttgcagttcagaatcgaccagtgcctgcatcaggtctgcgcccttttccatctcaaccatcggtacgccgtcctgcgccagctgttcgaagtccgcttcactcagcgcactcaaggaaccgctgaacaggcattcggtaatacgttttgccgcctgcaaaccttcttcaccgtgaaccagacgggtcacctgctccgccagtacatactgggcgcgcggtgctttaccgctgtttttatcttcttcttccagggcgttgatctcttcaatgctcataaaggtgaagaacttcaggaagcggtaaacgtcggcatccgcagtgttgatccagaactggtagaatttgtacgggctggttttcttcggatccaaccagactgcgccgccttcagttttaccaaatttggtgccatctgctttggtgatcagcggaacggtcaggccaaacacctgattctgatgcagacgacgggtcaggtcgataccagaagtgatgttaccccactgatcagaaccaccaatttgcagcaccacaccgtactgtttgttcagacaggcgaagtcataaccctgcaacaggttgtaggaaaactcagtgaacgaaatcccctgatcttcacggttgagacgctgctcaaccgcctcttttttgatcatctggttaacggagaagtgtttgccaatatcgcgcaggaaggtcagcacattcatattgccgaaccagtcatagttgttcgccgcgatagcagagttttctccacagtcgaaatcgaggaacggggcaacctgcttacggattttgtccacccactcctgaacagtttcttcagtgttcagcttacgctcggcagctttgaagctcgggtcgccaatcagacccgtcgcgccgcctaccagcgcaaccggcttgtggcccgcctgctggaagcgtttcaggcataacaatggaacaagatgccccaaatgcaagctgtcagcggtaggatcgaagccgcaatagagcgcgatcgggccttgcgccagtcgctctgctaacgcttcctcgtccgtcacctgggctaccagcccccgctcttgcaattgtttaatcaagttactgcttgccatcaaaatctccatgtatataacgactgcacctttgccggtacacgacttttcgccagatgcgaaagagacatagaataaagtgccagaatcaggagtaccagcgattaaagcaagatttttgcatcttttcagggtgcaagacgatcaatcttccacgcatcattttcacgctggtacaaaaagcggtcatgcaggcgatgctcaccaccctgccagaactcaatctgttcaaggctgacgcgaaaaccgccccaaaagctcggcaatggcacttcgccctgttgaaacttctgcttcagctccaggaatttactttcaaggataccgcgggcagaaatgcgactggactgcttcgaaacccatgcaccaatctggctatcacgcgggcggctatgaaaatatttcatcacttcgagagtcgaaagtcgttctgctttaccgatcaccatcacctggcgctcaagggtatgccacgggaacagcaggctaacgcgcggattattttcgatttgatgtgctttacggctgccgaggttggtgtaaaacaccatgcctttttcgtcgtaatgtttgagtaaaacgatgcgctgataaggctgaccatgttcatccacggtagcgaccaccatcgcggtagggtccgccagtttggcttcacaagcctgagagagccaacgttcaaaaagggttaatggatcggcgggaagatcgcggcggcgtaacccgcctttggtgtattcacggcgcagatgcgcgatttgctgcaattcgtcgttatcagacatggttttctttacggattgtcagtgggtgacgctattgtgcgccgcccctggaaaaatctcaacgctgtggattttgtaactgacagttattcaagacgatgcggtcgcgtttatagacagtcgcttcatcgcctttcgaccagaaaacatagattccgtcagtgtaacgcgcgccagaggctgaaatgccctgtttgagatgcagtagttgattatcgtaaacaaaactgacctcctggcgcggattattcagtttgaccgtcaacggtttttcatcacactggtattccagcgtatcggtttgcatgcgctcaaccagctgattaaaggcgctacagccggagagaaggaccggcaaaatgataattaacagttttttcatagtcatatcccgaagactttcctggtctggagggcaatacgccctccctaacgttccaagtgtaacggcagacgcggtaagaaaaattcagttaactctgatatcacgggttagcggggaaaatagcccccagtaccgtctcctggcttgcgccagtgacggaaggcagatttcctggtaatcccgccagcgtccgccaggcaagccaggcgaaagccaatgcttccatgtcatcgccactaatgccaacggcatcggtggtggtgacttctgtgcctggcagtaatgccgccagacgcgccatgagtagcggattacgactacctccaccacataccatcaatcgttcgcagccaccgctcaacaaaacttgttcagaaatggtcacggcggtgagttctgccagtgtggcctgaacatcacggggatcaacacccggaaaatggcgtaaatggcgctccagccagccgtagttaaagtattcgcgtccggtgcttttcggtgcaggttgcgagaaatatgggtcgctgagcatattttgcagcagtgggagaataactttacccgcccgtgcccactcggcatctttatcgtaaggtttaccggcctgacgccagatccaggcatccatcagcatgttaccaggaccggtatcgtagccgccaaccggctgcccaggaatgagcagtgacagattggcgatgccgccaatattgagcaccattcgtcgctcggttgggtgagccagcaaggcatgatggaacgcaggtaccagcggtgcgccttgtcctcccaaggcaatatcgcgacggcgaaaatcaccgacaaccgtaattccggtgcgtgccacaatttgattgttatcgccaatctgtaaagtgtgtggtgccacgcccgtcggttcatgccagacggtttgaccgtgacagccgatcgcaactatatctctcgcctgcaggttttgttccttaagcaaggcattgaccgcatcagcaaaaagtcgcccgagttgagtatcaagctgtccaaactgcgaaagtgtaagctgctggccctggcaaatatccagtacagcctgtttcagagacaccgggatcggccagctcaagcttgccagctgtgcgacccggtgttcatctattgtcgccaacacaacatcaacaccatcaaggctggtgcctgacataacgccaataaagcggcccgatttcatagttcatcctttttcaatctgacgtttgcgcaccactcaaacataaacttttcgtgaataccatgcggaatgaccgatttttaccgttggtagtaaaacattatcttcaaatcaataatcatcatgaatgttttgtttataattggttgatcctactttcattatgatttgctcatatttggtagaacatgtaaccatggattcacatatgccatatactttgaccatgagggatgcttgcgtggcgtttcatggtgaacaggagatttttcaatgattaaacgcgtattggttgtttcaatggtaggtctgtctcttgtcggttgtgttaataacgacaccctgtcaggggatgtttataccgcttctgaagcgaaacaagtacagaatgtcagctatggcaccatcgttaatgtacgtccggtacagattcagggcggtgatgattccaacgttatcggtgcaattggcggtgctgttcttggtggtttcctggggaatactgttggtggcggaaccgggcgttctctgactactgcagcaggcgctgttgcaggtggcgtagctggtcagggcgtacagagtgcaatgaacaaaacgcagggtgtcgagctggaaattcgtaaagacgatggtaataccatcatggtggtacagaaacaaggcaacactcgtttctctccgggccaacgtgtcgtactggccagcaatggcagtcaggtgaccgtttctccgcgctaaataagtttgcgtgtggtcaggttactgaccacacgcccccttcatttcaccctttggcctgtaactcaatgatattatgctcaagttttgcgatgagcgtaatcagttgttccagttcctctgcggagatgccatgtaatatttccgcgcgggttttgttaataacagcttccatttcgctgatcagtggctctgccttttccgtcagtttaatacgtttagcccgacgatcgctggcacaagtttgacgcgaaattaaccctttttcttccagttggtccagagtacggaccagtgatggctgctcgatgccaatcgcttttgccagttgaatttgcgactggtctggaggtaactgatggatattgtgtaacgtaacccaatgggtttgtgttaactccagcggtttcaggcgatggtctatcagagcacgccatatgcgcaccaaccgtgccagatcagaacctagtggcgattccaatttcatctccttataattagcttgctaagatattatgcggcttttagaatagtgtgcagcaattgtattgctaaaacaaatgtattgctgcatttggttaccgtcagacatatttttcagaaattgcgcgtaaatttttcgcacttaaagaatatttattaatctaacgcaatatattcggtcgtaaaggaatctactttgtgaagtttatgctcaatgcaacaggattgcccttacaagatctggtgttcggtgcgtccgtctactttcctccgtttttcaaagccttcgcgtttggattcgtcatctggcttgtcgtacaccgcctgcttcgtggctggatctacgccggtgacatctggcatcccttgttaatggatttatcgctgtttgcgatttgcgtttgccttgctctggcaatactgattgcgtggtaactatgtcaattaaaacaattaagtatttctcaacaatcattgtagcggtagttgcggttcttgccggatggtggctgtggaattattacatgcaatctccgtggacacgcgacgggaaaatacgcgcagaacaggtttctatcaccccacaggtgtcgggacgtattgttgagctgaatataaaagacaaccagctggttaacgcaggggatcttctgctcacgatcgataaaacgccctttcagatcgccgagctgaacgcacaggctcagctggcgaaagcgcaatctgacctcgcaaaagccaataacgaagcgaatcgtcgtcgtcatctctcacaaaattttatttctgccgaagaactcgataccgctaacctcaatgttaaagcgatgcaggccagtgttaatgccgcacaggccacgctgaaacagacacaatggcaactggcgcaaacggaaattcgcgccccggtgagtggttgggtgactaacctcactacccgcatcggcgattacgctgacaccgggaaaccgctgtttgcccttgtcgacagccactcgttttacgtcattggttattttgaagaaaccaagttgcgccatatccgcgaaggtgcaccagcacaaattaccctctatagtgataacaaaacgttacagggtcacgtttccagtatcggtcgggcgatttatgatcagagcgttgaaagtgactcaagccttattccggatgttaaacctaacgtcccctgggttcgactcgcccaacgcgttcccgtccgctttgcgctggataaagtcccaggcgatgtcacgttggtgtcgggcaccacctgtagcattgccgtaggtcaataatgaacgcatcgtcatggtccttgcgcaatttgccctggttcagggccacgctggcgcaatggcgttatgcgttacgcaataccattgccatgtgtctggcgctgacggttgcctattatttaaatctggatgaaccctattgggcgatgacctcggctgcagtggttagctttcccaccgttggcggtgttatcagcaaaagcctcggacgcatcgctggcagtttgctcggagccattgcggcactgcttcttgccgggcatacgctcaatgagccgtggttttttctattgagcatgtcggcgtggcttggcttttgtacctgggcctgtgcgcacttcacgaataacgtcgcgtatgcatttcaactggcgggctacacggctgccatcatcgcctttccgatggttaatattactgaggccagccagctgtgggatatcgctcaggcgcgcgtttgcgaggtgattgtcggcattttgtgcggcggcatgatgatgatgatcctgcctagcagttccgatgctacagcccttttaaccgcattgaaaaacatgcacgcccgactacttgaacatgccagtttactctggcagcctgaaacaaccgatgccattcgtgcagcacatgaaggggtgattgggcagatactgaccatgaatttgctgcgtatccaggctttctggagccactatcgttttcgccagcaaaacgcgcgccttaatgcgctgctccaccagcaattacgtatgaccagtgtcatctctagcctgcgacgtatgttgctcaactggccctcaccgccaggtgccacacgagaaattctcgaacagttgctgacggcgctcgccagttcgcaaacagatgtttacaccgtcgcacgtattatcgccccgctacgcccgaccaacgtcgccgactatcggcacgtcgccttctggcagcgactacgttatttttgccgcctttatctgcaaagtagtcaggaattacatcgtctgcaaagcggtgtagatgatcataccagactcccacggacatccggcctggctcgtcataccgataacgccgaagctatgtggagcgggctgcgtacattttgtacgttgatgatgattggcgcatggagtattgcttcgcaatgggatgccggtgccaatgcattaacgctggcagcaattagctgcgtactctactccgccgtcgcagcaccgtttaagtcgttgtcacttctgatgcgcacgctggtgttactttcgctattcagctttgtggtcaaatttggtctgatggtccagattagcgatctgtggcaatttttactgtttctctttccactgctggcgacaatgcagcttcttaaattgcagatgccaaaatttgccgcattgtgggggcaactgattgtttttatgggttcttttatcgctgtcactaatcccccggtgtatgattttgctgattttcttaacgataatctggcaaaaatcgttggcgtcgcgttggcgtggttagcgttcgccattctgcgtccaggatcggatgctcgtaaaagccgccgccatattcgcgcgctgcgccgggattttgtcgatcagctaagccgccatccaacactgagtgaaagcgaatttgaatcgctcacttatcatcacgtcagtcagttgagtaacagccaggatgcgctggctcgccgttggttattacgctggggtgtagtgctgctgaactgttctcatgttgtctggcaattgcgcgactgggaatcgcgttccgatccgttatcgcgagtacgggataactgtatttcactgttgcggggagtgatgagtgagcgtggcgttcagcaaaaatcactggcggccacacttgaagaattacagcggatttgcgacagccttgcccgtcatcatcaacctgccgcccgtgagctggcggcaattgtctggcggctgtactgctcgctttcgcaacttgagcaagcaccaccgcaaggtacgctggcctcttaattacttaattacaccacaggcatagcgttcaccgccaccgcccagcggtttaggttgatcggacatattatcgccgccaacgtggaccatcagcgctttgtctttgatttcatccagtgatttcagacgaggcgcgatgacggcatcggtagctttgccgtcattattgacgaccagtgcaggcagatcgcctaaatgcccggcaccttctggcccttcatgtttaccggtattttgtggatcaagatgcccgcctgcggattccgcggcgctggctttgccatctttggtggctggctggcagcttcctttggcatgaatatggaagccatgttcaccggggggtaatgctttcagatcgggcgaaaactccagacctttatcggtttcagtaatggtgacgctaccaattgactgccctaccccttgcgacgtgacgaggttcatctcgactttttcactggcagcttgtgcgccggttgcaacaaccagcgccagaatagccagactaaaacgtttcataggacctccgttcattgtgcattcctgaataagtgtaaaccagtgacacatttttgaacggcggctattcctaaaagtgcttacggtacgtcgtaccccagtgccgctttacggatacgaaaccattgttgacgggtcattttcagtgtttctgcttcgacagctgcccgtacgcgctcaattttacctgaaccgataattggcagcggctgcgatggtaaacgtaatacccaggcgtaaaccacctgttcaatcgagcccgcgtttaactcctctgccaccacagccagttcatcacgcagcggctggaaataatcatcattaaacagacgaccaccaccaaggcaggaccacgccatcggacgaacacgcagttgttgtagttggtcgagcgtgccatccagcagtaacggctgatgcaccggggatatttccacctgattagtggcaagggtaaacggcagacgtgattgcaacagggcaaattgcgcaggcgtaaagttcgatacgccaaaatgacgcactttgccgctctgatgcagatgtttgaacgcgtccgccacttcatcggcatccattaacgggtctggtcggtggattaacagcagatccagatgatcggtcgcgagattaattagcgactgttcggtgctcttaatgatgtgatcgcggtcagtgatgtaatgaccaatgacgttttcttcacgcgcggtcgtcgcgataccgcatttactgacgatttccatccgttcacgcaggtgaggtgccagtttcagtgcctcgccaaacgccgcttcgcactgatagccaccataaatatcagcatggtccacggtggtcacgccgagatccagatgctcttcaataaaactgaccagctggcgggcggacatattccagtccatcaatcgccagtagcccatcacaaaacgggaaaactccgggccttgcggcgcaatagtaatacgctgaaccataatcgcttcctcttatcagatatgagaggagtatacgcaagattaggttcaaaagagtgatggttgctccggttcgtctgatgacgctggcttatttgcgcgtaatttgcgcattaatcgctgccgacaaaggcgcagcacctcttgtttttcgccatcgctcattttattccagttaaaacgctcatcacgactacgaaaacagccgcgacaaaacccgcgttcgtcagactggcaaattccccggcacgggctctggacgggaaagaactctaattgctccgccacttcgccctcctcagataagattattaccattattgaagctgttaatgtccaaagtagcaactttgcttgcactagaccgactggtctactacactccaacgcatgaacaaacacaccgaacatgatactcgcgaacatctcctggcgacgggcgagcaactttgcctgcaacgtggattcaccgggatggggctaagcgaattactaaaaaccgctgaagtgccgaaagggtccttctatcactactttcgctctaaagaagcgtttggcgttgccatgcttgagcgtcattacgccgcatatcaccagcgactgactgagttgctgcaatccggcgaaggtaactaccgcgaccgcatactggcttattaccagcaaacactgaaccagttttgccaacatggaaccatcagtggttgcctgacagtaaaactctctgccgaagtgtgcgatctgtcagaagatatgcgcagcgcgatggataaaggtgctcgcggcgtgatcgccctgctctctcaggcgctggaaaatggccgtgagaaccattgtttaaccttttgtggcgaaccgctgcaacaggcacaagtgctttacgcactgtggcttggcgcgaatctgcaggccaaaatttcgcgcagtttcgagccactggaaaacgcgctggcccatgtaaaaaacattattgcgacgcctgccgtttagcaggcattttttatcaccagacgaccgggagcctttatgtcatctgaaaaactgtattccccactgaaagtgggcgcgatcacggcggcaaaccgtatttttatggcaccgctgacgcgtctgcgcagtattgaaccgggtgacattcctaccccgttgatggcggaatactatcgccaacgtgccagtgccggtttgattattagtgaagccacgcaaatttctgcccaggcaaaaggatatgcaggtgcgcctggcatccatagtccggagcaaattgccgcatggaaaaaaatcaccgctggcgttcatgctgaaaatggtcatatggccgtgcagctgtggcacaccggacgcatttctcacgccagcctgcaacctggcggtcaggcaccggtagcgccttcagcacttagcgcgggaacacgtacttctctgcgcgatgaaaatggtcaggcgatccgtgttgaaacatccatgccgcgtgcgcttgaactggaagagattccaggtatcgtcaatgatttccgtcaggccattgctaacgcgcgtgaagccggttttgatctggtagagctccactctgctcacggttatttgctgcatcagttcctttctccttcttcaaaccatcgtaccgatcagtacggcggcagcgtggaaaatcgcgcacgtctggtactggaagtggtcgatgccgggattgaagaatggggtgccgatcgcattggcattcgcatttcgccaatcggtactttccagaacacggataacggcccgaatgaagaagccgatgcactgtatctgattgaacaactgggtaaacgcggcattgcttatctgcatatgtcagaaccagattgggcggggggtgaaccgtatactgatgcgttccgcgaaaaagtacgcgcccgtttccacggtccgattatcggcgcaggtgcatacacagtagaaaaagctgaaacgctgatcggcaaagggttaattgatgcggtggcatttggtcgtgactggattgcgaacccggatctggtcgcccgcttgcagcgcaaagctgagcttaacccacagcgtgccgaaagtttctacggtggcggcgcggaaggctataccgattacccgacgttgtaatccaacattgcgagcggcgtaaagccgccgctatactaaaacaacattttgaatctgttagccattttgaggataaaaagatgcgtcttcttcataccatgctgcgcgttggcgatttgcaacgctccatcgatttttataccaaagtgctggacatgaaactgctgcgtaccagcgaaaacccggaatacaaatactcactggcgtttgttggctacggcccggaaaccgaagaagcggtgattgaactgacctacaactggggcgtggataaatacgaactcggcactgcttatggtcacatcgcgcttagcgtagataacgccgctgaagcgtgcgaaaaaatccgtcaaaacgggggtaacgtgacccgtgaagcgggtccggtaaaaggcggtactacggttatcgcgtttgtggaagatccggacggttacaaaattgagttaatcgaagaaaaagacgccggtcgcggtctgggcaactaatctcctgccgggcgtgaactcatcgcgcccgcatctttactgcatcgacaagtaatatttgtcataatgcgcgctgcaatttatccgtattaagagaatcagatgtccgataacgctcaacttaccggtctgtgcgaccgttttcgtggtttttatcctgttgtgatcgatgttgaaacagccggatttaacgccaaaaccgatgcgctgcttgagattgccgccatcaccctgaaaatggatgaacaaggctggctgatgccggacaccacattacatttccacgtcgaaccatttgtcggcgcaaatttgcaaccagaagccctcgccttcaacggcattgacccgaacgatcccgatcgcggcgcggtcagcgaatacgaggcgctgcacgaaatttttaaagttgtacgtaaaggtattaaagcgagcggctgtaaccgcgccattatggtggcgcacaacgccaattttgatcacagctttatgatggccgccgcagaacgcgcctcgctgaaacgtaacccgttccaccctttcgccacttttgacactgctgcactggccgggctggcactcggacaaaccgtattgtcaaaggnnnnnnnnnngaccgctggcatggacttcgacagcacccaggcgcactccgcgctgtacgacaccgaacgcactgctgtgctgttttgtgaaatcgtcaaccgctggaaacgtctgggaggctggccgctacccaccgccgaagaggtgtaatcgagtcgatgcctgatgacatataatgattcaggcatctatagtgaggctattccacgcatcctgcatgatattcacggggaatagcgttaatggcagataatccagacccttcatcgctcctgccggacgtgttttcaccggcgacccgcgactggtttcttcgcgcctttaaacagccgaccgctgtccagtcgcaaacctggcatgtggcggcgcgaggcgaacatgcgctggtgattgcaccgactggctccgggaaaacgctggcagcatttctctacgccctcgatcggctcttccgcgaaggcggcgaagatacccgcgaggcgcataagcgtaaaacctcacgcatcctctatatttcaccgataaaagccctgggcaccgacgttcagcgcaacttgcagatcccgttgaagggtattgccgatgaacggcggcggcgcggcgaaacggaagtcaatcttcgcgtagggatccgtactggcgatacgcctgcacaggaacgcagcaaactcacccgtaatccgccggatattctgatcaccacacccgaatcactctatctgatgctgacctcccgcgcgcgcgaaacgctacgcggcgtcgaaacggtaattattgatgaagtccacgcggtagcgggcagtaaacgtggtgcgcatctggcgttaagtctggagcggctcgatgcgctgctccacacctcagcacagcgaattggcctttctgccactgtgcgctcagccagcgatgtggcagcatttcttggtggcgatcgcccggttacggtagtcaacccgcccgcaatgcgtcatccgcagatacggattgtcgtaccggtcgccaatatggatgatgtctcatcggtcgccagcggcactggcgaagacagccatgccggccgggaaggctccatctggccatatattgaaacgggcatccttgatgaagtgttgcgccatcgctcgaccattgtctttactaattcgcgggggctggcggaaaaactgacggcacgattaaatgagctttacgccgcacgcttacagcgttccccgtctatcgccgttgatgcggcccatttcgagtcgacctccggcgcaacctctaaccgtgtacaaagtagcgacgtttttattgcccgctcacaccacggctccgtctctaaagaacaacgagcaatcaccgaacaggcgctgaaatcgggtgaattacgctgcgtggtcgcaacctccagtcttgaactggggattgatatgggcgcggtggatctggtgattcaggtggcaacgccgctttctgttgccagtgggttacaacgcattggtcgcgccggacatcaggttggcggtgtatctaaagggctgtttttcccccgtacccggcgtgatttagtcgattccgcagtcattgtagagtgtatgttcgcaggcaggctggaaaacctgacaccaccgcataatcctctcgacgtccttgcgcagcaaaccgttgccgccgcggcgatggatgcattacaggtagacgaatggtactcccgcgtacgccgtgccgcaccgtggaaagatctgccaagacgtgtttttgacgccacgctggatatgctttccgggcgctatccctctggcgatttttctgcttttcgccccaaactggtctggaacagggagaccgggatattgaccgcccgacctggcgctcaattgttggcggttaccagcggcggcaccattccggatcgtggcatgtatagcgtgttattacccgaaggtgaagaaaaggccggttcgcggcgggtgggtgaactggatgaggagatggtatatgagtcgcgggtgaacgacattatcactctcggcgctacctcatggcggatccagcaaatcacccgcgatcaggtgattgtgactcctgctccgggtcgttctgcccggctccccttctggcgtggtgaaggtaacggacgtccggctgaattaggcgagatgatcggcgattttcttcatttgctggcggatggcgcgttcttttccgggactattcccccgtggctggcagaagaaaatacgatcgccaatattcaggggttgattgaggagcagcgcaacgcgacgggcatcgttccggggagtcgccatctggtcctcgaacggtgccgtgatgaaattggtgactggcgtattattttgcactctccctatggaagacgggtgcatgaaccctgggcgctggcgattgccgggcgaatacatgccctatggggcgctgacgc

SEQ ID NO: 257 - DNA, 16710 bp, Escherichia coli
  source 1..16710: mol_type = genomic DNA
acactagagagtgtcgttggtatttaatgggggaaggtgagatgaaaaagatagctgctatatcattaattagtatttttattatgtctggttgtgctgtgcataatgatgagacaagtatcggtaaatttggtcttgcatataaaagtaatattcagcgtaaactcgataaccaatactacaccgaagccgaagcttctttagccaggggtagaatatctggtgcagaaaatatagtaaaaaatgatgcaactcatttctgtgttactcagggcaaaaaaatgcaaatagttgagctgaagacagaaggtgtaggattacatggtgtcgctcgtctgacattcaaatgtggagagtgagaatattttttggtaagcgtcaaatatgcgcgttctggctgtgcgtagccggaacctgtgggagcacgatgccgataagtgaaaggcatcgtgctatgaaggaggattctatcgatgtggtcaatggaagacggttaccagagatagggcttatgcataaaaaaataagcccgtgtaagggagattacacaggctaaggaggtggttcctggtacagctagcattttatgggttatgtttttcagcgaaacggatgataaccttaataaatgcagctgtatgtgatcggtttctaagaattttccatccgggaaaaataatcgaaattaatcacttaccgtgtgggttacgcgtggtttccccggagaaattacgcatcagcagagcgtaattgagctcaagatcctgcgggaccgggagccacacagtataaccatcgcctggtgcgaccggcatcgcttcacctttggcgttttccatgtgctcaagggtaaagttaatgttgccttgcggcgtcatcagctcaaggctgtcgccaacggagaatttatttttcaccgctaccgccgcgaggtcccccttgcgctcaccggtaaactcaccaacaaactgctggcggtcagaaactgaataaccgtattcgtagttctgataatcgtcgtgagtatgacgacgcaggaaaccttcggtatagccacgatgcgccagaccttccagagtttccagcaggctggtatcgaacggtttgcccgcagcggcgtcatcgatagctttacggtaaacctgtgcggtgcgtgcgcaatagtagaaagatttagtacggccttcgattttcagcgaatgcacgcccattttggtcaggcgttctacatgggcgatggcgcgcagatctttcgagttcatgatgtaagtgccgtgctcatcttcaaacgcggtcatatactcgcccggacgctgggcttcttcgatcataaacactttgtcggttggcgcgccgatacccagcgtcggctcaacattttgcaccggaatcggctcgtacttgtgtacgatgttgccaacgtcatcttctttcccttcctggacgttgtactcccagcggcaggcgttggtgcaggtaccctggttcggatcgcgcttgttgatatagccagagagcaggcagcgaccggagtaggccatgcacagtgcgccgtgaacgaagatctcgatctccatatccggcacctgattgcggatctcttcaatctcttccagcgacagctcgcgagagaggatcacgcgggtcaggcccatttgctgccagaatttcaccgtcgcccagtttacggcgttagcctgcaccgagaggtggatcggcatttcagggaagtgctcacgcaccagcataatcagccctggatcggacataatcagcgcatccggccccatttccaccaccggtttcaggtcacggataaaggttttcagcttggcgttgtgcggtgcaatgttgaccacgacataaaactttttccccagcgcgtgggcttcattgatgccgagctgaagattttcgtggttgaattcgttgttgcgcacacgcagggagtaacgcggctggcccgcataaacagcatctgcgccataagcgaaagcgtaacgcatatttttcagcgttcccgccggggaaaggagttccggtttaaacataattctctcgttctgatgacaggtcagatccgcttcacctgatgaagcggttaggggagtgcccccactttaagggcgggcattgtagcgctgtggggggatctggtaaagcgccggacgccaacaacccacgcccggcatcgtaattacgtattgtctttcaccgtctggcttgtgccattggctttaacggaggcaattccggtttcacgagattgcgcggtggcgtacatctggctggagccgataatttgatgattagcggctttcagattgaaatagaatttgccgttacttgccgtttttttctcatagcgttcttcttgcgggctgttgctacgcaccgacgcgatgcccttttccgcagaggcttttgaggtataaagctcgctggtgaggatagtctcaccattgcccgcttttagcacaaaccggaactgattatcactgctcttactgagttcaaaccaaccagccataatgactccttgattgaaattgtgtatcgaaaacagcatctaaaggtgctgtttaccgattaaagtatgagcgattttctgatgcctgccagggcggagagataatgtcagtttgctgaccatgcgtgggataatgttgccggatctggtctgaacgccatctccggctaacaaaataatgtcgctaaaactaaacgatgcggcaggcgtcggcttcccagcggtaaccgacgccataaacggcgcggataaatgactgttcggcgtcgagagattccagcttgcggcgcaggtttttaatgtggctgtcgatggtgcggtcggttactacgcggtagtcgtcataaagatgattgagcaattgctcgcgggagaacacttttcctggttcgtgagagagcgttttcagcagacgaaattccgcaggcgtcaggtcaagcattttaccgcgccatgaagcctgaaaacgaccttcgtcgataatcaacgggctttcagcatcctgttgctgcaactcgcgctgcggtttgcaacggcgcaaaatggttttgacgcgcgctaccacttcccgtgggctgtacggcttacagatataatcatctgcgccaatctccagccccagcaggcgatcgatctcttcgatttttgccgtcaccatcacgatcggaatgtcagaaaaacgacgaatttcccggcacagcgtcaggccatcggtgccagggagcatcagatctaacaggatcagatccggtggtgtctggcgcacatacggcagtacctgatcgccgtggctgataagcgtcggcgcatagctcgcagcacgcagataatcaatgagcaactgccccagcttcggttcatcttccacgatcaaaatacgcggtgtgttttcgtcgattggtaactcggtcatacttctctctgtaaatcccgttccagcggtaactctactgtaatgcttaccccgccaaaaggcgaatgggcagcaataatgcgaccattatgtgcttcaacaatgttcaggcaaatcgccagccccagcccggaaccgccgctggcacggttgcgggaaccttcggtgcgataaaaacgttcaaacaatttttgtagctgatcgtcactgacacctggcgcactgtcggcaaaggtcaggcgcaccgttttgtcgcgctgcccggcagagatttgcaggctgccgccgctgtcagtgtagcgcaggctgttttccagtaagttattgaataactgcattaaacggtcgcgatcgccaaatacggtaatactgtctggcagggaaaattgcagtttcaggccacgactggcgaatcgttcgcgaaatgcgccgcccgccacttccagcagtgggatcaaatctaccggtgctttttgataggcgagagcgccttcatcagacatcgacaactgatggagatcgtcaaccagtttggtcagtgtaccgacctccgcctgtaaagacgccaccgtctccggcgtgaatttacgcacgccatcctgaatggcttccagttcaccgcgcagcaccgctaatggcgtacgcagttcgtgagaaatatcggccataaaatcgcgccgcatttgctggtttttctccagtgtgctggcaagctggttgaagtcttgcgccagtttgcccagttcatcttcactggtgggcgttacgcgggtagtgaaatcgcccgccgccagtttgtgcgtgccatcgacaagtcgttttaccggtgccagtaaaccgcgcgccagcagaaaagtggcaagtgccgcgagtaacgttgccagggcgacaatcaaccagctggtttgccgctgttgtttatcgaaattgatatcagtattgcgcgttaaccgctcaacgggggaggcgatcaccgcgccaacttccgcaccgttgaccagaatgggtcgccgtgtaccgtcaggtggaatcggcgctcgcggaccaaccagcactttgttgttttgatcaaccacccagaactgggtacgccagccgtgcggtggcatacccgggccgggtttatcttccgaattatcgtgttcaaatgaacgcaggatctgaaagacaaagcgatcattgttgcgcaggaagcgccagttgccatgctgcgcatactgctcgccaagcgcatcacttaacagttgtaatcgctgttcattaccatgcttgatgtaatcaataaagccacgctcaaaactgatacgcaccgcccagtgcatactgatcagcaagacaatgcaggtggcgaaaatcgccagaaacagtttgccggtaataccgggtcgccagaacttcattgcgcgctcctttttcgccgcgaaatagctacattttgatgcgtatcgttcggcactctggcaaagatgaacgccggaagggcgatgatcaacgccatgctaagccaggtgtacataaagacggtttgtgtggtgccgctgtcgacgctgacatgctgtgaaccaaaaagtcccagcaacagcccggcgatagtgacgccgatactcatcgacaattgcataatcatcgacagcaggctgttgccgttgctcgccagattgtccgggagatctttcagcgtcagggtgttcatggaggagaaacgcgtcgagttgaccatcccttgtaaaaacaggacgaacggcaaaacgtagtaccagcccagcagggcggtagtcataaacaacagggtgaccagcgacagacccagcgtggtcgctaccagtacccgacgataaccaaagcgattcaccacctgtaccacaattcgcttcattcccatgctgccaagcaccatcgggatcatcatcagtccggcatgaaacggcgagaaaccgaggccaatttgcaggaaaaccggtgtcataaagggcaacatgccactgccaatacgtccggcaaagctccccgccaggcccagcgaaaaggtacgagtacggaacagtttcagactgaacagggcacggttgttatttctggcgtgcagcagataaagcaccagtgccaccacgccaactgcgaccaggcctgcaatcgtcagcggcgataaacctgtacctttactgccgtccagcgccagggttaataccgccatgccaaccgccagcaataaaaatccggagagatcaaagcgccgcgtctgcatggtgtagtttggcattaacagcaatgtggcgatcgcaccgataatccccaccggaatgttgatcaaaaagatccagtgccacgatgcgtactccaccagcagaccgccgagcgccggaccgagcagcggaccgacctgaccgggtaacgtgacaaaggtcatcgccgccatatattgctcgcgcggtacgattttcatcaccgtcaatctgccgaccggcaccatcatcgcgccgccaacgccctgtaacgcgcgtgccagcaacagttcgttcagcgtgccggaaagcgcgcaaaacagtgaaccgagagtaaacagcacgatggcggtaaagaaaatattgcgcacgccgactttgtccgccagccagccgctggcgggcagcatcaccgccacggtcagcacataagagacaatgaccatgtgcatatgcaacggactttccccgaggctttgcgccattgagggaagggcggtgtttacgatggtggtgtccagcgactgcataaagaagccgaaagccacaatccacaattgccaacgggtgctgtcgggaagatctgtcatttactcggttaccgtttgtttaggtttacgcgaaaaacgcagccgcagacggtcgaaaaagagatacaccaccggcgtggtatacagcgtaaggagctggctcattaccagtccgccgacaatggtgatccccaggggttgccgcagctccgagccgtcgccgcccgacaataccagcggcagcgcaccaaacagcgccgccagggtagtcatcataatcgggcgaaaacgcagcagacaggcctggaaaatagcttcctgcggcgtcaggttaccgtgccgttgggcttcaagcgcaaaatcgaccatcataatggcgtttttcttcacgatgccgattaatagcatgatccctatcagggcgattaggctgaacggggcattgaacagctccagcgccaacagcgctccaacgcccgccgagggcagggtggagagaatcgtcagcggatgtacgtaactctcgtaaaggatacccagcacgatatacaccgtggcgatggcggcgataatcaggagcacctgcgagttcatcgtctcctggaacacctgcgccgtgccggcaaaactgccgcgcaccgtcgaaggcacaccaagctgggtcattgcgcgatcgatcgccgcactggcgtccgagagcgattttccggtcggcaggttaaacgaaatggtcgaggccgccgataatccctgatgattcaccgatagtggggcattcgccggttgccatttagcgaaatacgacagcgggatcgctttgccttcgttattgataacgaacattttttccagcgcactgatgtcctgggtatagcgcggatccacttccatcaccactttatactggttcatcggctggtaaatggtcgagatttgccgctgaccgaaggcgttatttaacagactgttggcggcttgtacgtcgattcccagccgtgccatggtgtcgcggtcgtaaaccagattcatctccgcgccgttatcctgctgatcggagttcacgtccgccagttccggcaacgtcgccagttttttgcggattttcggctcccattctcgcagtgccgccaggtcgtcggataacaacgtgtactggtagctggcgttcgactgacgcccaccaacgcgaatatcctgtaccgccatcaggaacagattcgcccccggttctttcgccagttttacgcgcagacggtcgataatttgctgcgccgtttcgctgcgttcgtcgcgtggcttgagggtgataaacatcatcccgctgttcactcgcgaaccgcctgtaaagccggtgacattatccactgccggatcgtcacggataattttcatgaaatcctgcaacttaccgcgcatcgcctgaaacgaaatactctgatccgcctgaatcccgcccatcaacacgccagtgtcctgctccgggaagaaggttttcgggatcgagatatacagccagatattcagcgcaatggtgccaagcagcaccacgcccaccagacgggtatgattgagcacccatttcagtgacttgccgtagccttgttgcagggctaccaacatgcgaccaaaaccacgcagtcgcttttgctcgcgcggcttgctggctttcagcatccagccacacatcattggcgttaatgtcagagaaaccagcaacgatataccaatggcgacagaaagcgtcacggcaaattcgcgtaacagtcggcccggcaatccgcccatcaacagcagcggcaggaacaccgccaccagtgacagactcatcgacagcaccgtaaaaccgacttcgcgagtaccttgcagtgcggcttgcaacggtttcattcccgcttccagatgacgtgcaatgttttccagcaccacgatggcgtcatccaccacgaaaccagtagcgatggtgagcgccattaacgaaaggttattgagactgaatccgcacaggtacatcgccgcaaacgtaccaatcagcgaaaccggcaccgaaacggcgggaataatagtggcgcgacccgagcgcaggaataaaaacaccaccagaatcaccagcgccaccgagataatcagcgtttgctcgacttcttccagcgaggcgcgaatggtgggggagcgatcctgggcaatttgcagatcaatcgccgccggaatggtttcctgcaactccggtaattttgcccggatgctgtcaaccgtctggataatattggcttccggcagtttgcggatcatcagtaaaatagccggtttggcgttggtcatcccggcgttgcgcacatcctgcactgagtcggtcaccgtcgccacatcgcccagacgaaccgcgccgccgttgttgtagtgaataatcaacggctgatattcagcggcggtttttagctcatcattggtctggatctgccagcggtgagtgccatcttccagcgcgccctgcggtttacgcacgttggcattgctgacggcggtgcgtacgtcgtccagcgacacgccctgattaaacagcgcctgcggattcagcccgacgcgtacggcgggcagtgagctgcctccgacatcgacatcaccaacaccgtcgatttgcgaaatcgtcggagccagctgcgtcgaggcgaaatcgtacagttcaccctgcgaataagtatcggacgtcagcgtgaggatcataattggcgcatccgacgggttcgctttgcgataggtcgggcggctgggcatcccactgggcagcaaactttgtgcagcgttgatcgccgcctgcacatcacgcgctgcgccgttgatatcccggtcaaaatcaaactgcaaaataatacgcgtgctgccgagcgaactgctggaggtcatttcactgactccggcaatgcgcccaagtgagcgctccagcggcgtggcaacggaagacgccattgtttctggtgacgcaccgggcagcgaggcgctgaccataatcaccggaaaatcgacctgcggcagcggggcgaccggcagcatacggaagcccagtatgccgcacagggtaatggcaaccgacagtaaaatcgtcgccaccggacggtaaatgaagagggcaaaaaacttcacttacgcctcctcttcatgacgggcaaagcggcttttggtccacaatgccaggcggtcgaacagcagataaatcaccggcgtggtgaacagcgtcagcacctggctgacaatcaggccgccgaccatgccgatacctaacggacgacgcagttccgcgccgaccccggtactcaacatcagcggcagcgcgccaagcagagccgccagggtggtcatcaggatcggacgaaaacgcaacagacaagcctggtagattgcctcgcgcggcgacatgccttgctcgcgctcggcagccagcgcgaagtcgatcatcatgatggcgttcttcttcacgataccgatcagcaaaataatgccgataatcgcaatcacatccagttcgctaccagcaatcagcaacgccagcagtgcgccaacccctgcggtgggtagcgtcgagagaatggtgatcgggtgaataaagctctcgtacagaatgccgagcacgatatacatcgccaccaccgccgcgacaatcagccagacagtgctgcccagcgccgactggaaggcgagggtgctgccctggaactgcgtggtgatatccaccggcagattcagcgtcttttcggtgtccataatcgcctgcaccgcatcgcccagcgaatagttatccggcacgttaaaggagatggtcgttaccgggaactgatccagatggttgatggagagcggcgcaaaacgctgctcaattttggcaattgagcttagcggcaccacgccgccgtcgctgctggtcaggcgaatggtatccagcgccgcgaggcctggggtattttcggtgttgtgctccagcaccacgcgatactggttggcctgagtataaatagtggaaatcagccgctgaccaaacgcgttgtacagggcgttatcgacatccgccatgctgatccccagacggctggcgctgtcgcgatcaacattgacatacgccaccagccctttgtcctgccagtcgctggagacatcagaaagctgtggcagttgctggagtttttccatcaactgtggcacccaggtactgagcgcatccagtgacgtggcctgcaaggtaaactggtactgggtgcggctgacctgagtatcaatagtcagatcctgcgttggttgcaggaagagatcgacgcccggcactttatctaccgccgtttgcagacgggcgatgactttttgcacccgatcatcacgttcatccaacggtttgaggttgatttgtaaacgtgcactgttcagcgacgggttagtgccatcaacgccaacaaatgaggtcaggctttgcactgccggatcctgcaaaatcacgtccgcgacctggcgttgtcgctgggccatattggcaaaggagctggattgcggtgcctgcaaagtgccctgaataattccattgtcctgtaccgggaagaaacctttcggaatgaacacccacagcagcacgctaagcagcagcgtgctgagtgccacgcttaaggtcagccacggatgattcagcactttcgccagtccacgaccataggcggcgattatcctgtcgaacattttttccgaggcacgggagaagcggttctgtttacgcaacgactcctggctgagcatccgcgcgcacatcatcggtgtcagggtcagcgacaccaccgctgagatcaaaatcgctaccgccagggtaatagcaaattcgcggaacagtcgcccgacgatatcgcccataaacagcagtgggatcaacaccgcaatcagtgagaaggtcagcgagataatggtaaagccgatttcacctgcgcccttgagcgccgccgccaacggtttttcgcctttttcgatatagcgggaaatgttttcgatcaccacgatggcgtcatcgaccacgaatccggtggcgatagttaacgccatcagtgtcaggttattgattgaaaaatcgagaaacaccataaccgcgaaagtgccgattaacgacagcggtacagcaacaccgggaatgatggtcgccggaatgttgcgcaaaaacaggtagataatcatgactaccagcgcgatagccatcatcaattcaaactgagtatcatcgacggatgcgcggatattggtggtgcgatcggaaagcactgtcaccttcaccgatttcggcagactctcagtgagctgtggcagcatctgccgaatgctgtcggcggtggagataatgttagcaccgggctggcgctgaacattcatcacaatggcctgttctttgttcgcccacgcgccgagccagctgttttctgcaccttgctctacagttgcgacatcgcccagacgaattggcgcgccgttctggtaggcgatgattagctggcgatactcttcggcggattgcatctggtcgttcgcggaaagcgtgaccgcacgggaagggccgtcgaggctaccttttgccgagttaacgttagcgccggtaatggcggtgcgcacggtttcgctggtcaggccgagggcggcaatcgcctgagcgttaagtttgacgcgaacagccggacgctgaccgccggaaagcgtcaccaggccgacgccggaaatctgcgagattttctgcgcgacgcgggtttccaccatatcttccacttgcgtcatcggcatggcggttgaggtgacggcgagcgtcatgatcggcggatctgccgggttcactttgctgtaaaccggcgggttaggcagatcgctcggcaacaagttggtcgcagcgttaatcgcggcctgcacttcctgctcggcgacatcgagcggtaatgttagctggaactgcaaagtgataactgacgcaccgccggaactttgcgacgacatctgtttcaggccagacatctgcccgaactggcgttctagcggcgcggtaacggcagaggtcatgacatccgggctggcacctgggtagagcgtgaccacctgaatggtcggatagtccacttccggcagcgccgaaacgggcagggcgcgataaccgataatcccggcgagtaagatcgccaccatcagcagcgtggtggccacaggacgcataataaacaggcgcgacgggccgcctgtgctgctcgggggtaacacctgcatcaggagcgtgctccttttttcgcgtattcgcggctggtggctttctcttccggagtagtggcgctctgggcttccaccacttccactttcgccccttcggtcaggcgatcaatgccgtctgtcaccacgcgatcgcccgcagaaatacctgcacggatcaccactttctgactgtcctgaatgcccggcgtcaccagatgtttgctgaccttgttttcgctattcagcacccagacaaaatggccttcattgcccatttgcagggcggctgttgggatcactacggcgttttgttcggtgtcgactaacatgcgcgcgttaacaaactgattgggaaacagcgcatcatcctgattattaaagcgtgctttcactttaatcgtaccggtagtggcatcgatttggttatctagacttaacagcgtgccttcacttaatttcttcgagttggtgcgatcccaggcttctaccaccagcggttttccggctttctgcgcctgcactacggtagcgatatcgctttccggcagggtaaagactaaatcgataggatgcgtctgggtgatcaccacgatcccggtggtatcaccactggagatttggttaccaacatcaacctgcttgagaccaacgcgaccatcgactggtgcggtaatccggctccagtcgagttgcagctgcgcgctggcaacgcttgcttcatcagccttaatggtgccttcggtttcactgaccagcgcctgttgggcatccagctcctggcgggaaacgagattggtttttgccagttgttgataacgcgccaggtcacggcgggcgttggcaagcgtggctttatcttttgccagttggccctgggcttgtgctaatgcaactttgaactggctggggtcaatttctgccagtaaatcgcctgctttgacctgctggccttcctggaaatgtaacgctatcagttggccgtccacgcggctgcgcaccgtaacggtattagcggcggtaatggtgccaagcccggtgaggtaacgcggaactgcctgttctacggcggtcgccgcctgaaccggggctaatgggccggaacgcataccacgtcgaccacccgctggcgattgctgcgcttgtttcgtcgcccctggggctgcactccgggagtcattgcggccttgccagaaccagaatgcggcgatggcggcgataaccaccacgattacgattacccaacgggatttataactacctttcatcgttaagagtttctcttcctgaaacgtttcgcggaatgatactagtgtagccagccaataagggagaaaaatggaggaattatgaaacactgtcgggaatcgtctgaatgacgggcacatttgcgagcacgcatccagtaataacacaggaaactattttatctacgcgttagcgatagactgcttgcatggcgaaaggaggtaagccgcagatttcagccggatgctgaaacgggaaagcccctcccgaggaaggggccttaaataaggaaagggtcatgatgaagctactcatcatcgtggtgctcttagtcataagcttccccgcttactaagactaccagggcgggggaaaccccgctctaccctcactcctgaaagtatgccttcacgataagattgtcaatccgcaggctttgtagtctgcgatcctgccagcaaatattctttgcgagtcgttacgcaataatcacagaggaaactattttattcacgcgttagcgatagactgcattcagggcgaaaggaggtaagccgatgatttcagcgggacgctgaaacgggaaagcctctcccggagaagagggcttttaataaggaaagggttatgatgaagcacgtcatcatactggtgatactcttagtgattagcttccaggcttactaagaacaccagggggagggggaaacctctccctaaccctcactcctgaaattatgtcactccgcccttagtgtcaatcgacggctctccgttcttgcgaggcgaatagcaaaattttctgcgccgccgggcctaattctgaaagtttcttcgtttgctcttatttcgttattgcagtcggtatgataccggacctcgataattctctaagaaaggatttcttatgagcgaacaaatcacgtttgccaccagcgattttgccagtaacccggaaccacgttgcccctgcattttgctgctggatgtttctggttctatgaacggtagacctattaatgaacttaacgccggattggttacctttcgtgatgaactgcttgctgatccgctggctttaaaaagagtggaactcggcattgtgacgttcggcccggtgcatgtggaacaaccctttaccagcgccgctaatttttttccgcccatcctgtttgcccagggcgatacaccaatgggtgcggccattaccaaagccctggatatggtagaggagcggaaacgtgagtatcgtgcaaatggtatttcgtattatcgcccgtggattttcctgattaccgatggtgcaccaaccgatgagtggcaggctgcagccaacaaagtgtttcggggggaagaagataaaaggtttgctttcttttccatcggtgttcagggggcggatatgaagacgctggcacaaattagcgttcgtcagcctttgcctctgcaaggattacaattccgtgaactgtttagctggttatccagttcgctgcgttcggtttcccgctccacgccgggaacggaagttgtgctggaagcgccaaaaggctggacgtcagtgtgagctggcgtctggtctatgcatcaaccgttggaacgtcgcacatcagcgcggacttgccttgtcaggatgcctgccagatgcagattgcctggttaaatgaccagcagccattattgtcggtatttgtcgcggatggcgcaggcagtgtctcgcagggtggcgaaggcgcgatgctcgccgtcaatgaagcgatggcttatatgtcgcaaaaagtgcagggcggggaattggggcttaatgatgtcctcgccacaaatatggtactgaccattcgtcaacgactttttgccgaggcggaagccaaagaattagcggttcgcgattttgcctgcacatttctgggactgatttcatcgcctgacggcaccttgattatgcagattggcgatggcggcgtggtggtagatttgggtcacggtctgcaattgcctctcacgccgatggcgggtgaatatgccaacatgacgcatttcattaccgacgaagatgccgtttccagactggaaactttcaccagcactgggcgtgcgcacaaagttgcagcatttacggatggtatccagcgactggcgttaaatatgctggataattctcctcatgtgcctttctttaccccgtttttcaatggactggcggcagcaacgcaggaacaactcgatttattacctgaattgttaaagcagtttttgtccagcccggcggtaaacgagcgtacggatgatgataaaacgttggcactggcgctgtgggcagagtgagtttctcatggcggttgaagacaacaattcaaccgccagtttaaacaataaatataacggctgattagcgaactaattttgctcttagctcgtcggcttcttcttttggataggtgaccaataaaggatcaatggtataaccgccgtaaattttatccccgcgcgtatacatccagtctgaaatatcttctttcttgattttccactcctggccatattctacgtttgtaacaataccagggtcattgctgattacgccaataaacatgccgttagaataagtgacatccgtaagccagaaatgctcggttcttccgtgatcggttatcggggctttgactgcgaaagtatcggcatcttttttattcataacctcgatgaatttatcggtttctttccgcgcatgtttaatcgcgtcagacatcgcttgtttatcataacctcccgtcactaacgtatccgaaacttcactaaagcccgcggtagtaaaaaatagcagactcaacataagtaatatctttttcattttttctccagaatccctttgtagtcaaagttagcaaaaacctgtggaagttaatcattatcaggccgaaattgaattgtatcctgataaaattgcattatcatttttattcttgagtgggttttccccatatagaaataattttaatggttagttgttattattcattgaaatat

SEQ ID NO: 258 - DNA, 16710 bp, Escherichia coli
  source 1..16710: mol_type = genomic DNA
atatgggccagaattgctgaccagttatcgtgagagtaattcatcggcacgttaaatcatatcaggcgtaataccacaacccttaagttagcgcttatgggttttacccccgcgtggtggctacttcttcgattcgtaagcgagaactgccttaaactccataccacgttctctgatactcaactcacacaacgagtcacctaccatcagcgtgaatcccagtactgtacaacacagtacgatgattgccacaagggcatattttgtcagcatgtcttgcctccctgcaaagaagagactaacattcgaattgtttgggttcgaacgtaagcctcaggttgatagaaatatcgcctggggcttttgtccatctggaacctcgcgaatgcttaacgccagacagcctcaagcacccgacgccattctatacctgataattcttccagcggcgttcacgtttaaaatcaggaatactgctcgcaaaataaaaacgcccccatcatttctgacagaggcgtttaatttatccggcaatatttacccttcgtgcaatccacattccctttttaagccaaagaaacgtgtttcttcttccaacatgccaggttcccatttacgggttgtatgggtatcaccgaccgataaatatccttcatcccataatgggtgatatttcaggccatgtttttgcaggtactgataaatagttcggttatcccagtcgataatcggcagcactttaaatacgccacgctgaattgccagcaccggtaaattggcgcggctgccggattgttcgcggcgcaggccagcaaaccacgtttgcgcattcagttctttcagcgcccggttcatcggttcgactttgttgatgtcattgtacttttcaatgccttcaacgccctgttcccacagtttgccgtagcgtgcttcctgccaggcggcgctttcggtagcgcggtacactttcaggttgagcttgagtttgtccgttaactcgtcaataaagcggtaggtttccgggaacagatagccggtgtcggtgaggatcaccggaatatccgggtgaatctgattcaccagatgcaggctcaccgccgcctgaatgccaaagctggaagaaagtacatattcaccgggcagattatccagcgcccaggcaacgcggccttcagcgtccagtttttccagttcggcgttagtttctgccagcgccagaatgcgatctaccttcggcagttcgttcagggcgtttagatcgagtttggacatagattcctcactgtttgccttgcctgatgcgacgctcacgcgtcttatcaggcctacaagaccgggctgatggttaatcccacaaatcgcgcgccggatcgagcaccgggcgaatgatgcccgcacgcaccgtaaagtcgccgaagccttcacccgcttcgcgctctttcgcccagcgccctatcagttcatcaagcgacgccaggatttccnnnnnnnnnngatgttttctttatacatccgtgggatacgtgtcccaatgcggttgccgccaagatgcagattgtagcgacccggtgctttacccaccaggcccacttccgccagcatcgcgcgaccacaaccgttcgggcagcctgttacacgcatcacgatatgctcatcgctgacaccatgtttcgccattaaattatcgatgttgtcgataaaagacggcaggaaacgctccgcttccgccatcgccagcgggcaagtcgggaatgacacgcaggccatcgagttttcacgctgcggcgtgacggcattcattaaaccgctctctttggcgatcttctcgatcttcgctttctcgctttccggtacaccggcgatgatcagattctggttcgccgtaatgcggaaatcgcctttgtggatcttcgcgatctccagcaggccggttttcagcggacgccccggataatcaaggatgcgaccattttcgataaacagcgtcaggtgccagttatcatcaatgcccttaacccagccaatacgatcgcctcgtccggtgaactcatatggacggatcggttcaaatttgatccccgcgcgacgctccacttccgctttaaacgtctcaacccccacgcgctccagcgtgtatttggttttggcatttttacgatcggttcggttaccccagtcacgctgagttgtcacgacggcttcggccaccgccagcgtatgctccagcggcagatagccaaactcgctcgccgtgcgggcgtaggttttcttgttgccgtgttcgatagaaagcccaccgcccaccagcaggttgaagcctaccagcttgccgttttcggcgattgccacgaagttcatgtcgttggcatgcagatcgatatcgttctgcggcgggatcactactgtggttttgaacttacgcggcaggtaggtctgaccaaggatcggttcttcatcagtagtggcgactttttcctggtcgagccagatctccgcatacgcgcgggtacgaggcaacagatgctcagaaatcttcttcgcccactcgtacgcttccgcgtgcagctgcgactcgtaagggttcgaggtgcagagtacgttacggttcatgtcgttagctgtcgccagcgcatcaagaccgaccgagtgcagcatctggtgcaccggtttgacgttctttttcagaatgccgtggaactgaaacgtctggcggttggtcaggcgaatgctgccatagatggtgttttcaccggcaaatttgtcgatcgcctgccactgtttagtggtaatcaccccacccggcagacgacagcgaagcagcatcgcgtggcgcggctccagcttctgttcagcacgttcggcgcggatgtcgcggtcatcctgctgatacatgccgtggaagnnnnnnnnnntgttatcgcccttaaagccgccggtcagaccgtcgtttaaatcttccgcaatggtgccgcgcaggtagttgctttcaagcttcatgcgctcggcgtctgtcagttttccttcgaccactaaaggccctggatgtttttcgctcattagtagacatctcgctgataacggcgctctacgcgcagctcacttaaaaattcatccgccgcttcggtgtccatgccaccaaattcggcaatcacttccagaagtgcctgctcaacgtctttcgccatgcgattagcgtcgccgcagacataaatgtgggcaccatcattgatccagcgccacagctccgcgccctgttcgcgcagtttgtcttgtacgtaaactttttctttttggtcgcgcgaccaggcaagatcgatacgtgtcagcacgccatctttgacgtagcgctgccactccacctggtacaggaagtcttccgtaaagtgcggattaccaaagaacagccagtttttacctggcgcttcgtcggcggcgcgttgctgcataaaggcgcggaacggcgcaataccggtgcctgggccaatcataatcaccggggtttctggattggctggtaggcggaagttatcgttatgttcgataaatacgcggacttcgccctcttcttccacgcggtcagcgaggaagctggaggcaccaccggcacgggcgcggccttccacgtcgtaacgcaccacaccaacggtgacgtgtacttcgttctcgacttccgcctgcgaggaggcaatggaatagagacgcggcgtcagcgggcgcagcagattaattagcgcttcggcatcaagctgtgccggggagaaacgcaccatgtcgacaatcggcgtcgtcgcggcgtaatgctgtaacttcgctttatcgcccaccagcggcagcagtgtttcgctgcgggtaagcgtggcgtaattctcaacaatgttggcggtgttgacggtcagttcgaagtgccactgtagcgcttcgttcagaggcaacgttttgccctcgacggtgacaggttcatcgcctttcagccacagcagttcgacaagttctttcaccagtgccggatcgttctgataccagacgcccagcgcgtcacccggctggtaacgcaggcccgagtcacctaagtcaatttcgatatggcgaacgtctttttcagagttacgcccggtaattttctggttaacagagaggctagccaccagcggcgcgtctttgctgtacgggctggtgtggatttcatttaccgcgccagtagcgacggattgcgaaggtgccgcgacaggcgcacgcgatttaagcgcatcaaccacgcgggcgcgccactcgctggcagcagcctggtattcaacatcggcatcgacacggtcgagcaggcgttcaccacccagttccgccagcttgctgtcaaaatctttcccggactggcagaaaaattcataagagctatcgccgaggctaaacacggcaaatgcggtgttttccagcttcggcgcttttttggagaacaggaacttatgcagcgcgacggcttcttccggcggttccccttctccttgcgttgacgtcaccacgataagcagtttttcgctggcgatttgtttgaatttatagtcgcccgcgttcaccagcttaacgttcagttttgccgctaataaatcatcacgtaatgcttcagcaacacggcgcgcattgccggtttgcgaggcggagataatagttatacccggcatttctgcggcgggagctggcgtcgctgcaagcgcagcaggctgctgattgagcacgccccagaaatagccagaaacccaggcaagctgggtgggagttaaatcggtcgtggccgcctgaaggcgtaccagttgctccgggttcaacggaagcaacgcggaaggtgggacctgtgtcgtcatgcgtcgttatgttccagtaagcaaagctgtttctgcgccctgtcagcgcccataaaacagaagagaaggtaaggttaacggggtgaacggtgtggattaaagacgggatagcgataactaataaccaaatcgactaacctgttttagcaatagtctttaacaacaaaatagattaaccaacctaatgaaaaacaaatgaatttagccaatcattaagataaatcagcgattttgcgcaacaaagtcgttttagataatgcgaaaaaacagcctttccggtactctacggcggttttatcgtcctgtagagaaattatgatgtccaccacgttatttaaagatttcaccttcgaagccgctcaccgcttaccacacgtcccggaagggcataaatgtggtcgcctgcacgggcattcctttatggtgcgactggaaattaccggggaagtcgatccgcatacgggctggattatcgatttcgctgaactgaaagcagcgtttaagccaacttatgagcgcctcgatcaccattatctcaatgatattccaggcctggaaaacccgaccagcgaagttttagcaaaatggatttgggatcaggttaaacccgttgtgccgctgttaagtgcggtgatggtaaaagaaacctgcaccgctggttgtatctatcgcggcgaatgataagagtgtgtcggcggtcaatttcccttaagtaacgctatgttagggtgttgtgttctggatatctggggcatgacatggaagacgactgcgacattattattattggtgccggtattgcaggcaccgcttgcgcgttacgctgcgcgcgagcgggtttatccgttttgttactggaacgcgctgaaatccccggcagcaaaaatctttccggcgggcggttatatacccatgcactcgcggaactcctccctcagtttcatctgaccgcgcctcttgaacgatgcatcactcacgaaagcctttccctgttaacgccggatggcgcaacgacgttttccagcttacagcccggcggtgaatcctggagtgtattacgtgcacggttcgatccgtggctggttgccgaagccgaaaaagaaggtgtcgaatgcatccctggtgcgacggtggatgcactgtatgaagaaaacggcagggtgtgtggtgtcatttgtggtgacgatattctccgcgcccgttatgtggtgctggcagaaggtgccaacagcgtcctggctgagcgtcacgggttagtgactcgtcctgctggcgaagcgatggcgttggggatcaaagaagtgctgtcgctggaaacatccgctattgaagaacgttttcatctggagaataacgaaggcgcagcgttgctgttcagcggcgggatctgtgatgacttacccggcggcgcatttctttatactaatcaacaaacgctctcgttagggattgtttgcccgctctcttcccttacgcaaagccgtgttccggcaagcgagctgctgactcgctttaaagcgcatccggcagtgcgcccgcttatcaaaaacacggaatcactggagtatggtgcgcatctggtgccagaaggtggcttgcacagtatgccggtgcaatacgccggtaacggctggctgctggtgggcgatgcgttgcgcagttgcgtcaataccggaatttccgtgcgcggcatggatatggcgctgactggcgcgcaggcggcggcacaaacgctgataagcgcctgccagcaccgcgagccgcaaaatctgtttccgctttatcatcacaacgtagagcgcagcctgctgtgggatgttctacagcgttatcagcatgttccggcgcttttgcaacgcccgggatggtaccgtacgtggcctgcgttaatgcaggatatttcccgcgatttatgggatcagggtgataaacctgttccaccgctgcgccagttattctggcatcatttacgtcgtcacggcctgtggcatctggcgggcgatgttatcaggagtctgcgatgtctgtagcccgtaatctctggcgcgttgctgatgcgccgcacattgttccggctgactccgttgagcgccagacggcagaacggttgattagcgcctgtccggcaggtcttttttcgctcacaccggaaggtgacttacgtattgactatcgcagttgcctggagtgtggcacctgccgtttgctgtgcgacgaatcaacactacaacagtggcgctatccgccttccggattcggcatcacctaccgctttggataaataataaggataatttatgcccctcttacacctgctccgccagaatccggtgattgctgccgttaaagataatgccagcctgcaactggcaatcgattctgaatgccaatttatttccgtgttgtacggcaatatctgcaccatcagtaatatcgttaaaaagattaagaacgccgggaaatatgcttttattcatgttgatttgctggaaggcgcgtcaaataaagaagtcgttattcagtttttgaaactggtgaccgaggcggacggcattatcagtaccaaagcctcaatgttgaaagcggcaagagcggaaggttttttctgtattcatcgcctgtttattgttgattcaatttcgtttcacaacattgataagcaagttgcgcaatcgaatccggattgtattgagatcctgccaggctgtatgcccaaagtgctgggctgggtgacagagaaaatccgccaaccgctgattgccggtgggctggtgtgcgatgaagaagatgcgcgtaatgcgattaacgcgggtgtcgtggcgctttccaccacgaataccggggtctggacgttagcgaaaaaattactttgacgggataatcgtaaccaattgaatttggtttgatttgtaggccgcacgccacatccgacattcagcgcctgatgcgacgcttgacgcgtcttatcaggcctacaagtccccaggccagaaccgtaggcaggatcatccggcaacacgttattggcaatctgcgtgaatgtttgtcaccagtgcctccagcaccactttccagtcatcaaccacgccaacatctgcctgtgaaaataccgcagcgctggcgtcatgattaatcgccaccacaaacttgctattgcgtacgcccgccattaacgctgctgcgccagaagcgccaacaacaatacacacctcaggtgccagcagatgtccggaaataccaatcactttttcagcatcaacgccaccgttcatcactcgcgcccgactgtagcccacttcggctcccagcttttctgccagcatagcgatttcctggttatctgcctctccgccctgccccaccaccagcacccgtctggcctcagctaatgggtcgcgagtaacatttttcagatcctctgtgctaaccagccagtccggaagcgcacccgggacaatgatcagttgttgcattccagagggcaacgtggcgtttttcgctgctcccgcctgacgcgccagggaaaggcatagcgggcgtttttctgtttgcagcgtcgccgttagcgcatttccccagtgggatttgcgcacgcttacggttggaatatctaacgaagtcacctggcagatgcttgcaccatgtaaacgccaggccagccgggtcgacagttcatcgccaaacgttcccggcggaaagagaacaacgtccgcaggcgttcgctgccactgttccaccaacgcatccagcacctgttccgccactacaggctgaggttcaatctgccagtgcgccagggtacaaccgctgaaatcctgcgccgccagccagcttgctattgcggcattctcctgatttattgtcacaattgcgatattcatggctgcatcctttggcgtaaatagtcccgccatagcttttgagctttttctgctaccgtttgcccatcaatcagcgtcgctccgcgtcgttgctctgctcttgccagttgcagacactgcatcgctggcatttcggcagcaacagttttacggataatttctgctttccccgcagccattcgctggcgcattcccggtactggcaaggccacttcaccgcactgacgcacggcaatcaccgcaggcaagcgaacccggcaacaacgcaacccatgttcagtacgctgttcgagggtgataaacagcgcgtcgagagtgaaacgctccacctgggtgaagcagggccagcccagcatttccgccagcaaaaatggcgtttgcccattctgcccttcgctgctttggcagccggtaattatcagatccagcggattctgatgctgccattcggcaatatggcgagcgacaaattccggcgcaaagcgcagatctgccgccgtctccagcaatacagcttcctcaaacccaagagccatgagatagcgcagccagtgcaatgcccgttcatcccccatgctcaacgcggttaaagacatcggcgtaccgttttttctctgcgccaacagcagcgcggcagcggcctgttcatcagcaccgagtaaacttcgcagtagcgaaatatccggtccgcttttaccctgagccgccgcctgccactctttttccgccagcattccggcatccggttcggctttaaacgctaacagaatgttcattcgcacctcctacatttcccgccgccaccagcgggagggctttagtttctggtgcccatagccaggtcacaacaaaaccaaccaacaacactgtcgccaggagcaataaggtgacttgcattccccactgcgccagcacccacggcagcaggccagtacttaccgccgcgccaagtcgactcatggcggtggcaaaaccgacgcccagcgagcgaatgtcagtaggaaaactttccgcaggcaaaatgcccaccagattactgactgccgaaatggtggtgctgaagagaacaaaaagcagcagcgttaatgaactgccggaaggcaaacaggccatgactaccagcgttgccgccagcagcaaaaaacttcccagcaaaaatttgcgatgtgccagcaggtgcgtcagaactaatcccagcagcgcgcccacaattaacaacgcattaagcatcaggctggcagtcagcgcatcttccagaccaatagtctgggcgatagttggcagccaggtataaatcacaaaccatgggattacgaggcagacaaagaagacgctgttaaacgccgtgcgccgccagtaacgcgaagagaacaaggttttgatgtgtttatgggtcgccgttaccacttcatcgcccagtaaaacatggggaccaaaatagcgatgcacgatagcgtgagcttctgcaaaacgcccctggcgcagtagccagcgtggtgattctggcgttccccagcgtaataacgtaatcaacaacgcgggcagagctgccgatgccagtagccagcgccaggcctccgggttttcggaaataaagtgatgtccggcaatacttgccagcacatagcctacggtccacaccacgctgaatgcgcccagcaaaataccgcgatggcggcgcggggaaaattcagccagcaaggtgtgacctactgaataatcgcctcccagaccaatgccaatcaaaatgcgcagtccaataagatgctctggcgtggtggcaaaaaattgtaaaaacgaagcaagcgtaatcagcaaaaagctgaaggtgaagattttttgccgaccaatatggtcggagatccacccaagaaccaggctgccaaggaacaaaccaaggagcgccgagccgccgatcattcccgccataaacggcgtcagttgcatggcgggcgtaagctgaataatggcgtaaccaatgacgccgagaacataaccgtcggtcaggtgtgcgccgaaagtgagcgcagcaatgcggcagtgaaaacggttaagcggtaaatcatccattcgcaccggtgaagtgttcatctttaccccttcattgtccggtaataagaacggcttctcgcctgagaagccgaaaaggcaacgccccgtcatcgcggaacgctgcctgacacattatttttcaatcggatagatagtacccgtattcataatgccattaggatcgaactgctttttcagcccttccagcaacgcccacgcgctgccgtgttccagtttgctccagtgaacgcgatgtttaccgataccgtggtggtgcaccatcgaaccgccgaggcgaatggtttcttcacagatgatcttgttgagcggattgtggtacttgtcgatttcctcttccggcttacagtcaacgacgttgtaatcgtagacgaagtacatgttggtgccgttctgatagctatgagaggaatgaccgcccagcatggtgatgtcgtcggcgtgcgggaactcagtacgaatacggttaataacgctttcgtagatttcgtggatgcagctccagcagccggacacttcagtggtaaagcccatgttgccggttttgaggatctgcacacgttcggcagccactttatccggtccccagttcaggttgttaaaccaggtttcgatcagtttgctgtccacgcgctggcactgcgggtagcgggcaacgatttccgcaatcccttcgcccgtcgccttcgcaatgcgaggattgccttcagccataaagatcagcacacatttaccgtcggcaaaatgggtgaagtgttgggtgccatcttcagcgtcatacaaacgagcgatcgacggacgatacccttccaccatgacttcacgcaggatgttgaagccggttttcatgtcttccaggatatagccgtagaagaggttgttttccggggtgaatttaaagattttcactgttacttcagtgatatagcaaagtgcaccttcgttaccgatgatgatgtggcgaatgtccgggccagccgcgcggcgtggcacgtttttaatgcgtgtgacggtgccatcagccaatactgcttccagaccaacgaccatatcttcgattgcgccgtagagtgtggagaactgcccgatactgcgggttgctaccaggccgcccatctgcgccagcggctttgactgcggagaatgccccgtggtgtaacctttttcacgcaacgcattttccagcacccccagcggaacgccacattgcgccgtcgcctgcatattctcaatatcaatattaatgatttgattcatggcggagccgtcgagcaccaccgagttttccacaacggtttccagcccaccttcagtggcggaagcgccggtacgcggcacaccgttaattttgtgcgcattcataaaattcagcacacgggagacttgttctgtggaaccgagttttacgaccgctgccggaatcggcaaagtataaataccatgaatatccggaaatttacgaaaacggtcaatactgttcttctttaatactgtttcatcggtaattacgcgatctgcaccaacaatttcctttagttggtcgacaatcgctgcgcgagataaagacatagtaattccttcctgataataaaaatggaataatcattaataagagaaaacagaaaccaccgttatgggttagcgcactaaataaccgccatcaaccactaataaatgcccgttgacataattcgatgccggacttgcgaggaatacggctgcgcccattaaatcctgagtatcgccccaacggtttgccggaatatgatcaagaacgcgctgattggtttctggattactgcgtgtcgccagcgtaatatctgttgcataatagccaggggcgataccatttacctgaatattatattgacctagttcatcacaataagctttggtgaacccggcaagagcatgtttagtggcagaatatgcaggtgaccattgtccacctaagtaagagaacaatgaacagatattaataattttgccgcttttctgcgggatcataatttttgcagcttcatagcttaactcgaatgcggcggtcaggttcacatcaatcatcggatcccagtcggcacgaccgaagtccagcaccttattcagcttacaaataccggcattgttaaccagaatatcaactgtaccgaaacgctcacagctagcagcgataatcttctgcggcgcgccttctgcggtgatatccacctgcatgaagtccacctcaacaccctgtttttcaatcatttcctttgtttcgccgttatctttgacgaaactaggaataaagatatttgcgccagctttggccaacgccatggcaaatgcctggcctaaaccgctattcccaccggtaacaattgcggttttacctttcagggagaaaaaatccattgagaacgcattgagagattcgattgacatagttagctccaatttccgtaaggcaaaaaaaaagaaaggtaacttcccccgcgagagggaagttacctttctcattatctctggtaactgtagataatttttagcataacggcataactgctaatgtgatcgtaatcacagtgtgatattcgtattgtcaaatagttttaaaaagcagaagcgtgattactctcacacaacacctctgctttccatgttatttcttattgcaattactagagacctgagaaaagtaatccacctgaaagggcggcttacttttctcttttttttgtctattacaaatgggaatacgatatgcaacacaactcatatcgccgttggataaccctcgcgataattagttttagcggcggcgttagtttcgacctggcttatttacgttatatttatcaaattcccatggcgaaatttatgggattcagcaataccgagataggtttaataatgagtacctttggtattgcggctattattctttatgcccccagcggcgttattgccgataaattttcacaccgcaaaatgattacttccgcgatgatcattaccggattactgggtctgttaatggcaacgtatccaccgctctgggtaatgctctgtattcaggtcgcctttgcgataacaacgattttaatgctgtggtcggtgtcgattaaagccgcctcgttgctgggcgatcatagcgagcaagggaaaattatgggctggatggaagggctgcgcggcgtcggtgtaatgtcgctggcggtgtttaccatgtgggtcttttctcgctttgcaccggatgacagcaccagcctgaaaacggtcattatcatctatagtgtggtttacatcttgttggggattctgtgctggttttttgttagcgataacaacaacctgcgcagtgccaataacgaagaaaaacagtcattccagcttagcgacatcctggccgttttgcgcatcagcaccacctggtattgcagcatggtgatttttggtgtcttcaccatctacgccattctgagttactccaccaactatctgaccgaaatgtacggcatgtctctggtggcggcgagctacatggggattgtgatcaacaaaatcttccgcgcgctgtgcggcccacttggcggcattatcaccacctacagtaaagtgaaatcccctacccgcgtgattcaaatcctttccatcatcggtttgctggcgttgacagccctgctcgtcacgaactctaacccgcaatcggtcgcgatggggattggcctgattttactgctgggattcacctgttacgcctcacgcgggctgtactgggcctgccccggcgaagcgagaacaccgtcttacattatgggcaccacggtaggtatttgttcggtgattggattcctgccggatgtcttcgtttacccgattatcggccactggcaagacaccctgcccgctgcagaagcctaccgcaatatgtggctgatgggcatggcggcgctcggcatggtgattgtctttacctttttgctgttccaaaaaattcgtactgctgatagcgcccccgcaatggctagcagcaagtaagccaggaaaattacaggagaaaaatcatgtcgaaaaaatacatcatagggattgatggcggaagtcagagcacaaaagtggtgatgtacgatctggaaggtaatgtggtttgcgaaggtaaaggcttattacagccgatgcacacgccagatgccgatactgcagaacatcctgacgacgatttatgggcatcattatgttttgccggtcacgatttgatgagtcagtttgccgggaataaagaagatattgtcggtattggtctgggatccatccgttgctgccgtgcgttattgaaagccgatggcacgccagctgcgccgttgattagctggcaggatgcacgcgttacacgcccttacgaacatacgaatcctgacgtggcgtatgtcacctctttttcgggttatctgacgcatcgcttaaccggcgagtttaaagacaatatcgccaactattttggtcagtggccggtggattataagagctgggcatggagcgaagatgctgcggtaatggataagtttaatatcccccgtcatatgctgtttgatgtgcaaatgcctggcaccgtcctcggacatatcacaccacaagccgcactggcgacacatttcccggcaggactgccggttgtttgtaccaccagtgataaaccggtagaagctctgggggccggattactggatgatgaaactgcggtaatttctcttggcacttacatcgcattgatgatgaacggcaaagcactgccgaaagatccggtggcgtactggccgattatgtcttctattccgcaaacattgctgtatgaaggttacggtattcgcaaaggtatgtggacggtgagctggctacgcgacatgttaggcgagtcgttaattcaggatgccaaagcacaggatctttcaccggaagatttgctcaacaaaaaagcttcttgtgtgccgcctggctgtaatggtctgatgacggtgctggactggctgaccaacccgtgggaaccctacaaacgtgggattatgatcggctttgattccagcatggattacgcatggatatatcgttcgatactggaaagcgtggcgctgacgctgaagaacaattacgacaatatgtgtaatgaaatgaattactttgcaaagcatgtgatcattactggcggcggttcgaacagcgatctgtttatgcagatttttgccgacgtgttcaaccttccggcacgacgtaacgccattaacggttgtgcaagcctgggggcagcgattaatacagcggtaggtctggggctatacccggattacgcaacggctgtcgataaaatggttcgcgtgaaagatatctttatgcctgttgagagcaatgccaaacgctacgacgcgatgaataaaggcattttcaaagatttaaccaaacacactgatgtgattctgaaaaaatcgtatgaagtgatgcatggggaattggggaatgcggattcgatccagagctggtcgaatgcgtgaatgaggtaggccaggcggaaaactgcccggcctgaacatacctaaatagttatccccgctgacgcggggaacataagttcgacaacttaaaaaatgataacaagtccggtttatccccgctgatgctgggaacataataaaaactttaactagttcggtttatccctgtttttacaaggaatattaactacactcgatgtctttagaataaaagacaatacgaatcgcactctatcaattttcacttaaagtatgaactggatatctttattcataagaactattcatcaacagcgtatagaggcggttatgtaaaaccactcattagcctcaaaacaaagacaaatttccagatttattacttaatcaatgaataac

SEQ ID NO: 259 - DNA, 16561 bp, Escherichia coli
  source 1..16561: mol_type = genomic DNA
ggattgcccagaccggtgacagtgaaagctggcgtcagtgggaaaatggcaagtgtgccattcctgatcgtgtagtcgagcaactgttggctatgcgtcagcaaagaaaaaaacatcttcatgccatcatagagaaaataaataaccgcatcggcaacaacaccatgcgttttttccccgacttaaccgcatttcaacgagtctaccctgatggcaattttattgactggaagatctatcaatcggtagccgctgaattatatgcacacgatctggagcggctttgttaatttttacagagaaaggaattgtcgttgttacaacaataatgaatggatactgacacaacatcgctacactttttaaagcacctttgctaagtagaacctatgaaaaatccctattaccctaccgcacttgggttatattttaattacctggtgcatggtatgggcgtcattttgatgagcctgaatatggcctcgctggagacactttggcagactaatgccgcgggtgtctcgatagttatctcatcgctgggcattggtcgattaagtgtcttgctttttgcaggattattatccgatcgctttggtcgccgcccttttatcatgctcgggatgtgctgctatatggccttcttttttggcatcctgcacaccaataacatcattatcgcttatgtttttggctttctggcaggaatggcaaacagttttctcgatgcaggcacttatcccagtttgatggaagcttttccacgctcacctgggacagccaatattttaattaaagcatttgtttccagcggacaatttttattaccgctaatcattagcctgttagtgtgggctgaactgtggttcggttggtcctttatgattgctgcaggcattatgtttattaacgctctgtttttatacctttgtacgttcccaccccatccgggtcatcgcttacctgtcataaagaaaaccaccagctctacggaacatcgctgttcaattatcgatttagccagttataccttatatggctatatctcaatggcaacgttttatctggttagccagtggctggcacagtacggacaatttgttgcaggcatgtcatacactatgtcgattaaactactcagtatctacaccgtgggttcgctgctttgtgtatttattaccgctccactcattcgtaataccgttcgcccaacaacattactgatgctgtacacctttatctcatttattgctctgtttaccgtctgcctgcatcccacattttatgtggtgataatatttgcttttgtcattggttttacctctgctggaggtgttgtgcaaattggcctgacgttaatggctgaacgtttcccttacgctaaaggtaaagctacagggatctattacagtgcgggcagtattgcgacctttactattccgttgattacggctcatctgtcccaaagaagtattgccgatattatgtggttcgataccgccatcgctgccatcggttttttactggcactgtttatcggcttacgcagccgcaaaaaaacgcggcatcactcgctaaaggaaaatgtcgctccgggtgggtaatgcaatattcttttcaggtcatgcaagatcttacggataaataactctttctgcgctaactaaggaaaatcgcgatcaaaaacaaactatgacatgcaatattcctggaaacataaactttatgccatgtacccagggaaaatcatcttcagtatagtaattatgtaaaccgtcgaagaacaatacgtacggtaacgaaattatctttcagcaaggagctgtgaaaatgtctcaaaataaggctttcagcacgccatttatcctggctgttctttgtatttacttcagctacttcctgcacggcattagtgttattacgcttgcccaaaacatgtcatctctggcggaaaagttttccactgacaacgcgggcattgcctacttaatttccggtattggtttggggcgattgatcagtattttattcttcggtgtgatctccgataagtttggtcgtcgggcggtgatattaatggcagtaataatgtatctgctattcttctttggtattcccgcttgcccgaatttaactctcgcctacggtctggcagtgtgcgtaggtatcgctaactcagcgctggatacgggtggctaccccgcgctcatggaatgctttccgaaagcctctggttcggcggtcatactggttaaagcgatggtgtcatttgggcaaatgttctacccaatgctggtgagctatatgttgctcaataatatctggtacggctatgggctgattattccgggtattctgtttgtactgatcacgctgatgctgttgaaaagcaaattccccagccagttggtggacgccagcgtagctaatgaattaccgcaaatgaacagcaaaccgttagtctggctggaaggtgtttcatcggtactgttcggtgtagccgcattctcgaccttttatgtgattgtggtgtggatgcccaaatatgcgatggcttttgctggtatgtcagaagctgaggcattaaaaaccatctcttattacagtatgggctcgttggtctgtgtctttatttttgccgcactactgaaaaaaatggtccggcccatctgggctaatgtatttaactctgcactggcaacaataacagcagccattatctacctgtacccttctccactggtgtgtaatgccggcgcctttgttatcggtttctcagcagctggcggcattttacagctcggtgtttcggtcatgtcagagtttttcccaaaaagcaaagccaaagtcaccagtatttatatgatgatgggtggactggctaactttgttattccgctgattaccggttatctgtcgaacatcggccttcaatatatcattgttctcgattttactttcgcgctgctggccctgattaccgcaattattgtctttatccgctattaccgcgttttcattattcctgagaatgatgtgcggtttggcgagcgtaaatttagcacccggctaaacacaattaagcatagaggttaaaggagttaattatggatgttaccgcaaaatacgaattgattgggttgatggcttatcctatccgccacagtttatcgcctgaaatgcagaataaagccttagaaaaagcgggattgccatttacctatatggccttcgaagtggataacgatagctttcccggagcaattgaaggattaaaagctctaaaaatgcgcggaactggtgtatcaatgccgaacaaacaactggcgtgtgaatatgttgatgaattaacgccagcagccaaactggtgggtgccatcaacaccatcgttaatgatgatggctacctgcgcggctataacaccgacggcacgggccatattcgcgccattaaagagagcggttttgatatcaaaggcaaaacaatggtgctgttaggggccggaggtgcctcaacggcgattggcgcgcagggggcaattgaaggtttaaaagaaattaaactctttaaccgtcgggatgagttcttcgataaagccctcgccttcgcgcagcgggttaacgaaaacaccgattgtgtcgtcacggttaccgatctcgccgatcaacaagcctttgctgaagccctggcttccgccgacattttaaccaatggcacaaaagtgggtatgaaaccccttgagaatgaatcattagttaatgatatcagtctgttacatccgggactgctggtcactgaatgcgtgtataacccgcatatgacgaagttattgcagcaggcgcaacaagctggttgcaaaacgattgatggatacggcatgttgttgtggcaaggggctgaacagttcacgttatggactggcaaagatttccctctggaatatgttaaacaggtcatggggttcggtgcctgacaggctgaccgcgtgcagaaagggtaaaaaatgaaaaccgtaactgtaaaagatctcgtcattggtacgggcgcacctaaaatcatcgtctcgctgatggcgaaagatatcgcccgcgtgaaatccgaagctctcgcctatcgtgaagcggactttgatattctggaatggcgtgtggaccactttgccgacctctccaatgtggagtctgtcatggcggcggcaaaaattctccgtgaaaccatgccagaaaaaccgctgctgtttaccttccgcagtgccaaagaaggcggcgagcaggcgatttccaccgaggcttatattgctctcaatcgtgcagccatcgacagcggcctggttgatatgatcgatctggagttatttaccggcgatgatcaggttaaagaaaccgtcgcctacgcccacgcgcatgatgtgaaagttgtcatgtccaaccatgacttccataaaacgccggaagccgaagaaatcattgcccgtctgcgcaaaatgcagtccttcgacgccgatattcctaagattgcgctgatgccgcaaagtaccagcgatgtgctgacgttgcttgccgcgaccctggagatgcaggagcagtatgccgatcgtccaatcatcacgatgtcaatggcaaaaactggcgtaatttctcgtctggctggtgaagtatttggctcggcggcaacttttggtgcggtaaaaaaagcctctgcgccagggcaaatctcggtaaatgatttgcgcacagtattaactattttacatcaggcataagcaataatatttcggcgggaataccctcccccgccgaactaaaaaaatatattcagccgtatttaataaaaatatttcgtgagtctctgtgcgataattatccatctggcgtagggaaaatcacacctgaatcaggaattaacaatgaaacctgtaaaaccacctcgtattaatggacgagtgccggtcctgtcggcacaggaagcggtgaattatattcccgacgaagcaacactttgtgtgttaggcgctggcggcggtattctggaagccaccacgttaattactgctcttgctgataaatataaacagactcaaacgccacgtaatttatcgattattagtccgacagggcttggcgatcgcgccgaccgtggtattagtcctctggcgcaagaaggtctggtgaaatgggcattatgtggtcactggggacaatcgccgcgtatttctgaactcgcagaacaaaataaaattattgcttataactatccacaaggtgtacttacacaaaccttacgcgccgccgcagcccaccagcctggtattattagtgatattggcatcgggacatttgtcgatccacgccagcaaggcggcaaactgaatgaagtcacgaaagaagacctgattaaactggtcgagtttgataacaaagaatatctctattacaaagcgattgcgccagatatcgccttcattcgcgctaccacctgcgacagtgaaggctacgccacttttgaagatgaggtgatgtatctcgacgcattggttattgcccaggcggtgcacaataacggcggtattgtgatgatgcaggtgcagaaaatggttaagaaagccacgctgcatcctaaatctgtccgtattccgggttatctggtggatattgtggtggtcgatccggatcaaagccaactgtatggcggtgcgccggttaaccgttttatttctggtgacttcacccttgatgacagcaccaaacttagcctgcccctaaaccaacgtaaattagttgcgcggcgtgcattattcgaaatgcgtaaaggcgcggtggggaatgtcggcgtcggtattgctgacggtattggcctggtcgcccgggaagaaggttgtgctgatgactttattctgacggtagaaacaggtccgattggcggaattacttcacagggtatcgcctttggcgcgaacgtgaatacccgcgccattctggatatgacgtcccagtttgatttttatcacggtggtggtctggatgtttgttatttgagttttgctgaagtcgaccagcacggtaacgtcggcgtgcataaattcaatggcaaaatcatgggtaccggtggatttattgatatcagtgccacctcgaagaaaattattttctgcggcacgttaactgcgggcagtttaaaaacagaaattgccgatggcaaattgcatatcgtccaggaaggacgggtaaataaatttattcgggaactaccggaaattacttttagcggaaaaatcgcgctcgaacggggactggatgttcgttacatcaccgaacgtgctgtattcacgctgaaagaagacggcctgcatttaatcgaaatcgcccctggcgtcgatttacaaaaagatattctcgacaaaatggacttcaccccagtgatttcgccagaactcaaactgatggacgaaagattatttatcgatgcggcgatgggttttgtcctgcctgaagcggctcattaataggagtataatgatggatttttctttaactgaagaacaagaactgctgctggccagtattcgcgaactgattacgactaactttccggaagagtatttccgcacctgcgatcaaaacgggacatatccgcgtgagtttatgcgggcgctggcggataacggtatttccatgcttggcgtgccggaagaatttggtggtatccctgcggattacgtcacccaaatgctggcgctgatggaagtgtcaaaatgcggtgctccggcatttttgatcaccaacggtcaatgtattcacagtatgcgccgtttcggttctgcagagcagctacgtaaaacggcagaaagcaccctggaaacgggtgatcccgcctatgccctggcgttgacggaaccaggtgctggctcagataacaacagtgccactaccacttacacgcgtaaaaacggcaaggtctacatcaacggacaaaaaacctttattaccggtgcgaaagagtacccgtatatgctggtgttggcgcgcgatccgcaaccgaaagatcccaaaaaagccttcaccctgtggtgggtcgactccagtaagcccggcattaagattaacccgctgcataaaatcggctggcatatgctcagcacctgcgaagtctatctcgacaacgtggaggttgaagagagcgacatggtgggcgaagaaggaatgggtttcctcaatgtgatgtacaactttgagatggagcgcctgatcaacgccgcgcgcagcaccggctttgccgaatgcgcctttgaagatgccgcccgctatgccaaccaacgtatcgcttttggtaagcccattggtcataaccagatgatccaggaaaaactggcgctgatggcgattaagatcgacaacatgcgcaacatggtgctgaaagtggcatggcaagccgatcagcatcagtcactgcgcaccagcgcggcgctggcaaaactgtattgcgcacgtaccgcaatggaagtcattgatgatgcgattcaaatcatgggcggtctgggctataccgatgaagcgcgcgtctcccgcttctggcgtgatgtccgttgtgaacgtatcggcggcggtacagacgaaattatgatttacgtagcaggtcggcagatcctgaaagactatcagaacaaataatctgcaggcggcgcagcttcttaacaaactgcgccgccagatttatccaacaagacttaccggttgaggaaattcagataggatttcttgttccgcaaaacagtttttaaattgtctacggtaatcgctgggcgaacaaccgacatggcgcaaaaacagtttggcaaagtgatcgacattttcataacccacacgccaggagatctctgcctgtgataattcagtattagtgagtgaccattttgcttccgtcatacgccgttgaataacatagttaataggggaaatacgatactctttggtaaattcatggcaaatataactgacgctggcacgaaattttttcgataactgttctaaagtgattttttcgcgataattattattcagatagaaaagaatatcttttatcagaacatcttttttaatatacccctgctccgaacgataagcatttttaaaattttcgtagtaaagaatggctaacgtataggcaaatgcatcccataacgaagatgtttggctatttttactttgcggcaaaatcacacttagctcattaaataaggtttttatgacttcttttccctgccccgcggcaattaccggacaagaatgcggttgcagtagctgattttcctcagccccctgaaactgaaagccgtacagcgcacaggtacacgtcgttgccggatcgttaacgtcagaggccaccgcatgcagcctgccgcgttctatcaccacaatgtcatccgcatgtgcgacatataacgaagaatcgatggtaaaccttgcaacccctttcttgacgtaaatcaactcggtttcattgtcatgaacgtgatgtccggactcccattttggatcatcgctaaatgcaaaacgtgaaagccgtggcgttttaccggcgacaaacagcgtttcactggcgttatcaaaacagcgttgatacatgacaacctccctattccatgagcaagcaaaaacaatatatgccggataaaatacggcgtgtattgcggttatacaaccgcgtttagcgagagctaaacaagattatttacactgaatgcaagattgtacggtcatggaataactatattgccgcaaattgcacttttgttttagcgatcgcattttttttgccagattgttggcaaggaaaacagcttgctccgtcgaaaaccccgcaccgctatcgcacactattttcaggccatttttaccttccatcggagatggttccgtatgcgactcacaggagaaatcatgaaaataataacctgctttaagctggtgcctgaagaacaggacattgttgtcactccagaatacaccctgaatttcgacaatgccgacgccaaaatcagccagttcgatctcaatgccattgaagctgcaagccagctcacaacagatgacgatgagatagccgcgctgaccgttggcggctcattgttgcagaactcgaaagtgcgcaaagacgtgctatcccgcgggccgcacagcctgtatttggtgcaggatgcgcaacttgaacatgcactgcctctcgataccgcaaaagcgctggcggcagcaattgaaaagatcggcttcgatttactgatctttggtgaaggttccggcgacctttatgcccagcaggttggcttgctggtcggagaaattctgcaacttccggtgattaatgcagtgagtgctattcagcctcagggcaatacactggtgattgaacgcacgcttgaagatgatgttgaagttattgaactctctgttccagccgtgctctgcgtcacctccgatattaacgtgccacgcattccttcgatgaaagccattctcggcgcgggtaaaaaaccggtaaatcagtggcaggcaagtgatattgactggagccagagcgcgccacttgctgaactggtcggcattcgcgtaccgccgcaaacagaacgtaagcacatcattatcgataacgattcgccggaggccattgccgagctggcggaacatctgaagaaagccctgaactgaagcctacggagaagaaacgatgagtcaattaaacagcgtctgggtctttagcgataatcctgaacgttatgctgaactgtttggcggcgctcagcaatggggccaacaggtgtatgccattgtacaaaataccgaccaggcgcaggcagttatgccttatggtccaaaatgtatttatgttcttgagcaaaacgacgcgctgcaacgcactgaaaattacgccgaaagcattgctgccctgctgaaagataaacaccccgctatgttgctgttggccgcgacgaaacgtggtaaagctctggcagcacggttaagtgtgcaactgaatgcggcgctggtgaacgatgccacggcggtggatattgtcgatggtcacatttgcgccgaacaccggatgtatggcgggttagcgttcgctcaggaaaagatcaacagcccgctggcgatcattacccttgcacccggtgttcaggaaccgtgcaccagtgatacctctcatcagtgcccgacagaaacggtaccttatgttgctccgcgtcatgaaattctctgtcgcgaacgccgtgcgaaagccgcaagcagcgtggacctgagcaaagcaaaacgtgtggttggcgtcggtcgtggtcttgcggcgcaggatgacctgaaaatggtccacgaactggcggcggtgctgaatgctgaagtcggctgttcacgtccaattgccgaaggcgagaactggatggagcgtgaacgttatatcggtgtctccggcgtgttgctgaaatctgatctctacctgacgctggggatctccgggcagatccaacatatggttggcggcaacggcgcaaaagtgattgtcgccatcaataaagataaaaatgcgccaatcttcaactatgccgactacggtctggtgggcgatatctacaaagtcgtccctgccctgattagccagttgagccgctaattcccctttcaaccacatctcccgctgtaaacgcagcgggaagggagcataacgcatgtcggatgacaaatttgatgccattgtggtcggtgcgggcgttgctggtagcgttgccgcactggtcatggcacgagccgggctggatgtcctggtgatagaacgcggcgacagtgccggatgtaaaaacatgaccggcgggcgtctttatgcccacacacttgaagcaatcattccaggctttgcagcatcagcgccggtagaacgcaaggtcacacgcgagaaaatctccttcttaaccgaagaaagcgccgttaccctcgattttcaccgcgagcagccagatgttccgcaacacgcatcttataccgtattgcgtaatcgtctggacccgtggttgatggaacaagccgagcaggcgggcgcgcagtttatcccaggcgttcgcgtcgatgcgctggttcgtgaaggaaacaaggtaactggcgtgcaggctggggatgatattctcgaagcgaatgtggtgattctggctgatggcgttaactcgatgcttggccgctcgctgggaatggttcccgcttccgatccgcatcattacgctgttggtgttaaagaggttattggcctcacgccagaacagatcaacgatcgctttaatattacgggcgaggaaggtgccgcctggctgtttgccggttccccttctgacggcctgatgggtggcggattcctctataccaacaacgattccgtatcgttggggctggtttgtggattgggtgatatcgcccatgcgcaaaaaagcgtgccgcaaatgctggaagattttaaacaacaccccgccattcgcccactaattagcggcggcaaactgcttgaatattccgcgcatatggtgccagaaggcggtctggcaatggtgccgcagctggttaacgatggcgtgatgatcgttggtgacgccgcaggcttctgcctgaatttgggttttacagttcgtggcatggatttagccattgcatcggctcaggctgccgccacaacggtgatcgccgccaaagaacgcgaggatttctccgccagcagtctggcgcaatacaaacgtgagctggaacaaagctgcgtcatgcgcgatatgcagcatttccgcaagatcccggcgctgatggaaaacccgcgcctgtttagccaatacccacgaatggtcgccgacatcatgaacgagatgttcaccattgacggcaaaccaaaccagccggtacgcaaaatgatcatgggacatgcgaagaaaattgggctgatcaacttgctgaaagatggcattaagggagcaaccgcgctatgagccagaacgctacggttaacgtcgacatcaaattaggcgtcaataaattccatgttgatgagggccacccgcatatcattctggcggcaaatcccgatatcaatgaattccgtaaattaatgaaagcctgccctgccggactttataagcaggatgacgccggcaacattcattttgattctgccggttgtctggagtgcggcacctgtcgggtgctgtgcggtaacactattctcgaacagtggcaatatcccgcaggcaccttcggtattgattttcgctacggctaatcatgcatcccacaggcccgcatctcgggcctgatgttctgtttcgagagtccaacatgaaagtgacattaacgttcaacgaacaacgtcgtgcggcgtatcgtcagcaagggctatggggcgatgcttcgctggccgattactggcagcagaccgctcgtgcgatgccagacaaaattgccgtggtcgataatcatggagcatcgtacacctatagcgcgctcgatcacgccgcgagctgtctggcaaactggatgttagcgaagggtattgaatcaggcgatcgcatcgcatttcaactgccaggctggtgtgaatttaccgttatctatcttgcctgcctgaaaaccggtgcggtttccgtgccgctgttgccttcctggcgggaagcagaactggtgtgggtgctcaataagtgtcaggcaaaaatgttctttgcaccgacgttgtttaaacaaacgcgtccggtagatttaatcctgccgctgcaaaatcagcttccacaactacaacaaattgtcggtgtggacaaactggctcccgccacctcttccctctcattaagtcagattatcgccgacaatacctcactgaccacggcgataacgacccacggcgatgaattagctgcggtgctgtttacctccggaaccgagggtctgccaaagggcgtgatgctaacgcataacaatattctcgccagtgagcgggcttattgcgcgcgactgaatctgacctggcaggatgtctttatgatgcctgcgccacttggtcacgcaacgggctttctgcatggcgtaacggcaccattcttaattggcgctcgcagcgtgttgttagatattttcactcctgatgcgtgtctcgcgctgcttgagcagcagcgttgcacctgtatgctaggcgcaacgccgtttgtctatgatcttttgaatgtactagagaaacaacccgcggacctttcagcgctgcgtttctttctttgcggcggtaccacaatccccaaaaaagtggcacgtgaatgccagcagcgcggcattaaattattaagtgtttatggttccacagaaagttcgccgcatgcggtggtgaatctcgatgatcctttgtcgcgctttatgcacaccgatggttacgctgccgcaggtgtagagattaaagtggtcgatgacgcacgcaagaccttaccgccaggttgcgaaggtgaagaagcctcgcgtggccccaatgtgtttatggggtattttgatgaacctgaattaaccgcccgtgcgctggacgaagaaggctggtattacagcggcgatctctgccgcatggatgaggctggctatataaaaattaccggacgcaaaaaagatattattgtccgcggcggcgaaaacattagcagccgtgaagtggaagatattttattgcagcatcctaaaattcacgatgcctgtgtggttgcaatgcccgatgaacgtttaggtgaacgatcatgcgcttatgtcgtgctgaaagcgccgcatcattcattatcgctggaagaggtggtggctttttttagccgtaaacgggtcgcaaaatataaatatcctgaacatatcgtggtaatcgaaaaactaccgcgcactgcctcaggtaaaatacaaaagtttttgttaagaaaagatattatgcggcgattaacgcaggatgtctgtgaagagattgaataagtatcatcttcggggatcacataaccccggcgactgaacgccgccggggatttattttatttcttcagttcagccaggcttaaccaggtttgcaccacggtgtccgggttcagagacaggctatcgatcccctcttccatcaaccatgcggcaaagtcttcgtggtcggacggaccctgaccgcaaatcccgacatatttgccctgtttcttcgcggtacgaatcgccatcgacagcagtgctttcaccgcatcgttgcgctcatcgaacagttcagacaccacgccggagtcgcggtccagaccgagcgccagctgcgtcatatcgtttgagccaattgagaagccgtcgaaatattcgaggaactgctctgccagcaaggcgttggacgggatttcacacatcatgatgattttcagcccgttctcgccacgtttcagcccctgacgcgccagttcttcaaccaccgctttcgcctgatctacggtacgcacgaacgggatcatgatctcaacgttggtcagccccatgtcgttgcgcacacgtttcactgcttcacactccagcgcgaaacagtcgcggaagctgtcggaaacatagcggcccgcgccacggaagccgagcatcgggttctcttcatctggctcgtaacgctcaccaccgaccaggttggcatattcgttcgatttaaaatcagagagacggacaatgacgcgcttcggataaaacgcggcacccagcgtcgcgatcccttcagtcagacgaccaacgtaaaattcacgcggagaatcaaaacctttcatcatctcgcggatttcgttttgcaactgcggttcctgatcgtcaaactcaagcagtgcgcgtgggtggacgccaatcatacggttgatgataaattccagacgcgcaagtcccacgccttcgttcggcagacaggcgaagtcgaaagctcggtccgggttaccgacgttcatcatcaccttcaacggcaggcccggcatcgtttctacgctggagcttttcacgctaaattccagcaactccgcatagacgtaaccggtatcaccttcggcacaagaaacagtgacgttctcaccgtctttcatccgttctgttgcatcaccacagcccactaccgccggaatgcccagttcacgagcgatgatcgccgcgtgacaggtacgaccgccacggttggtgacgatggctgatgctttcttcatgatcggttcccagtccgggtcggtcatgtcagtaaccagcacgtcgccaggttcgatgcggttcatttcgctgatgtcatggatgactttcaccggacccgcgccgatgcgatgaccgatagcacggccttcggcgataatcttaccctgtgaatgcagcgtataacgctccatgacctgaccgcgtgagcgcacggtttccggacgcgcctgcacaatgaacagtttgccggtgtggccatctttcgcccactcaatatccattgggcgaccgtagtgtttctcaatttgtacggcctgttttgccagttcctgcacttcttcgttggtcagcgagaagatgtcacgctgttcctgcggtacgtcttcgattttaacctgcttgccgtgctcctgggtcggcgcgtaaaccatgcggatttttttcgaccccatggtgcggcgcacgatagccgggcgattcgccgccagtgtcggtttatgcacgtaaaactcatccgggttaaccgcaccctgtacgaccatttccccaaggccccatgcggaagtgataaacaccacctggtcaaagccggattcggtatcaatggagaacatcacgccagaagatgcgaggtcggagcgcaccatccgctgaacaccggcggagagcgccacgccacggtgatcgtaaccctggtgcacacgataagagatggcgcgatcgttaaacagagaagcaaatacatgtttcactgccacgagaacggcgtcaaaaccctgaacgttgaggaaagtttcctgctgaccggcaaaagaagcgtccggcatatcttctgcagtagcggaggaacgcaccgcaaacgaggcgttttcgtcatcggcggaaagctgtgcataggcttcgcggatggcgttttccagctcaggctggaagggagtgtcgataatccactggcggatttgcgcgcccgctttcgcaagctgggtaacatcgtcaatatccgttttatccagcagttcataaatgcgctggtttacgccgctttggtccagaaactggttaaacgcgtcggcggttgtggcgaaaccattcggaacggaaacgcccattccggaaagattagtaatcatttcacccagggaggcatttttgcccccaaccctgtctacatcattcatgccgagttggttataccaaagcaccagcggtgacgagccattgttggacatagaacaatccttttgtgataaatgaacggtttgagaaacacatttctgcgcatttatctttgcatatttaaccggatgaaaaaaacggtgaatcgttcaagcaaatatatttttttactttttaagac

SEQ ID NO: 260 - DNA, 16397 bp, Escherichia coli
  source 1..16397: mol_type = genomic DNA
ctataaatatagagtatattgaaggaaccaatgttagatttaactcgaataatatggcgatatattggaatagtagagcatctttattttgttcaactgaattaaactcgaaatcacaatcgcctgcattaggtttgggacatgagtttgctcatgcgcagtattaccttcttgataaggaaaatttcatggctcttttaagccgaacagataagaaatatgagaataaagaagaggcaagggttattacaataattgaatcgcgtgcggcgaaaactttaggtgagtgtaccagaggagctcatagtggactgcctttttatcgggtggatggaccgttgcagacgatgaaaataacgggtacgccagaatagtgaggttttttatgatgaaatatttgatggttttattgtctctattttctggttcggtactggggatggggcgagtgaatgaattgtgtggaatagatagcgtgaaaacgatagagataattaatcttccatcgtatgttaccacgttagttccgcttagcaaggaaggtcttaatgaaatatacagatataaagtggtggtgaatgaaattagcgatctttatgctggtaagataattgatttattgcaaatgaagtatttcagaaaagaaaaatataacaatataagatggggggttagtatcatttcgaaaggtaataataaatgtgaaatttattttgatgcttttggtgaatgtggaagtgtgaatggcattaacgtgtgttttgaaaaaaatgaaatgataggttggattaaacaagaaatccctttgctgtcgcaaaaaataggtgggctttaaatggtagggcaatattcaaagacagtataggtaactatttgtatggccatgtaaggtaaaagaaaaggaataaaccatgagcggaaaaccggcggcgcggcagggcgacatgacccgcagggaaagatcatcagaagttcactttttgtactaaataattcgcattttatgtttaaaaattgagatattcctcattacctgaagctgttttttattgcttatacatgatcaaatactccttacataaataaggtgaacaaatggaacttaaaaaattgatggaacatatttctattattcccgattacagataagcctggaaagtagagcataaattgtcaggcatcctactattgactatttttgccgttatttctggtgcagaaagttgggaagatatagaggatttcggggaaacacatctcgatttcttgaagcaatatggtgattttgaaaatggtattcctgttcacgatactattgccagagttgtatcctgtatcagtcctgcaaaatttcatgagtgctttattaactggatgcgtgactgccattcttcagatgataaagacgtcatcgcaattgatggaaaaacgctccggcactcttatgacaagagtcgccgcaggggagcgattcatgtcattagtgcgttctcaacaatgcacagtctggtcatcggacagatcaagacggatgagaaatctaatgagattacagctatcccagaacttcttaacatgctggatattaaaggaaaaatcatcacaactgatgcgatgggttgccagaaagatattgcagagaagatacaaaaacagggaggtgattatttattcgcggtaaaaggaaaccaggggcggctaaataaagcctttgaggaaaaatttccgctgaaagaattaaataatccagagcatgacagttacgcaatgagtgaaaagagtcacggcagagaagaaatccgtcttcatattgtttgcgatgtccctgatgaacttattgatttcacgtttgaatggaaaggactgaagaaattatgcgtggcagtctcctttcggtccataatagcagaacaaaagaaagagccagaaatgacggtcagatattatatcagttctgctgatttaactgcagaaaagttcgccacagcaatccgaaaccactggcacgtggagaataagctgcactggcgtctggacgtggtaatgaatgaagacgactgcaaaataagaagaggaaatgcagcagaattattttcagggatacggcacattgctattaatattttgacgaatgataaggtattcaaggcagggttaagacgtaagatgcgaaaagcagccatggacagaaactatctggcgtcagtccttgcggggagagggctttcgtaatcttgccctgacttgtagtctaattttcatggctgactttggtgaaagccgctattttaaacctgcaaaaatagctatgaataagaataatttgattataaggacgagtgatgtagaaatagcatttaagataacgaaataagtatttgttttaacagtgtttatgttttttaaaaagagaaaatggagtgcgattattagtttgaaatacaattaatagtgaggtaattaagctttgagaactgttattttctaaaaataaaaaatacaaaaaatgaatgcagctcgggaaatagtagaataattctcgctcagatgaagttgataatatttttaccaacaaaatacttccccgcaaaaactctgccccataaaattcatttaccatcgtctacacttactcctttataccgttcaggagcagtaatgaatctacaacgatttgatgacagcaccctaatccgtatctttgcccttcatgagttacatcgactgaaagaacatggcttaacgcgcggggcgcttctcgattatcacagccgctataaactcgtctttctggcgcattctcagccggagtaccgcaaacttggcccgttcgtggctgatattcaccagtggcaaaatctggatgactattacaaccagtaccgccaacgcgtagttgttttgctttctcaccccgccaacccgcgcgatcacaccaatgttttgatgcacgttcagggttattttcgcccgcatattgattccacagaacgccagcagctggctgcgcttatcgacagttatcgccgtggcgagcaaccacttcttgcgccgctgatgcgtatcaaacactatatggcgctttatcctgacgcctggctttcagggcagcgttatttcgaactttggccgcgtgtgattaacttgcgccattcaggagttttatgactacccatctggtctggtttcgccaggatttacgtctgcacgataatctcgcactggctgccgcctgccgcaattcgtctgcacgcgtgctggcgttgtatatcgctacaccacgccagtgggcgacgcataacatgtcgccgcgtcaggctgaacttatcaatgctcaactgaatgggctacaaatagcgcttgcggaaaaaggtattcctttattgttccgtgaagtggatgactttgtcgccagtgtcgaaatagttaaacaggtgtgcgcggaaaacagcgttacccacctgttttataactatcagtatgaagtgaatgagcgggcgcgggatgtggaagttgaaagagcgctgcgtaacgtggtgtgtgaaggatttgatgacagcgtgatcctgccgcctggcgcggtgatgaccggtaatcacgagatgtacaaagtctttacgccttttaagaatgcctggctgaaacggctgcgggaagggatgccggagtgcgtcgctgcgccaaaagttcgtagtagcggatcgatagagccctcgccatccattacgctgaattatcctcgtcagtctttcgatactgcgcatttcccggtggaagaaaaagcggcgattgcgcaattacgccagttttgccagaacggtgccggagaatatgagcaacaacgagattttccggcagtggaaggcaccagtcgtttgtccgccagcctggcaacgggcgggttatcgcctcgccagtgtttgcatcgcttgttggcggaacagccgcaggcgctggacggtggggccggtagtgtctggcttagtgagctgatctggcgcgagttctaccgtcatctgatgacgtattacccctcgttgtgtaaacattgtccgtttattgcctggacggatcgtgtgcagtggcagagcaatcccgcacatttacaggcctggcaggaaggcaaaacgggatacccgattgtcgatgccgccatgcgtcagcttaacagcactggctggatgcataaccggctacggatgatttcagccagttttctggtgaaagatttgttgatcgactggcgcgaaggcgagcgatatttcatgtcgcagctgattgatggtgatttggcagccaataacggtggctggcagtgggcggcgtctacgggtactgatgcagcgccgtattttcgtattttcaacccgacaacccagggcgagaaatttgatcgcgaaggtgagtttatccgccgatggttaccggagctgcgcgatgtaccagggaaagcggtgcatgagccgtggaagtgggcgcagaaagcaggtgtgatgctggattatccgcaaccgatagttgatcacaaagaggcaaggctgcgaacgctggcagcgtacgaagaagcgaggaaaggagcctgataaaacgcagcgagcgttttatcaggtatggtgctggcctattaagattccagcgccagcgcgcggtttctgaatttcagcgcctgatacagccaaatcatctgtaccagtcctacacacgccagtgcgccccaggtaatttgatcaaatacttcaatatatgcattgatggagtagttgatcgccccggaagcatcaaacgaagcctgcgatgtctgatcggcaatcacgcccgccagatagttcgcgatcgcgccagaaagcagcatgtagatgccggttaatacgccggtcacaccggggatttcaatgcgcgtaatttgcgacatggcaaccgggtcgataaacagttccgcaaagcccatcaccgccaggcctaataccatcagtggcagagaagagtgaccatacattgcggatcagcgggcgcttaaggtcagaatgcagaatccggcgctcatcaggccaaggccaagagcaaatttcccccagatgcgcacggtacgattacccgcgacactctcttttaccacccacgccaggaacacaccgcacagcataactgcgaaggcattaatcgactggaacatcgcggtcggaacggtataaccaaacatatcgcggttaacgaagcggtcgatataaaggctaatcgagctaccgccctgttgtgcgaaggcccagaacaacatactgaagaaggtgagcgtcacaatcagccccagctccttccgctgtttctggttttctgctttgcgataaatttttgccagtacacccaggccaataatagtcgcgacaattaaggcgtataccgaccactctttccagaacagtacggtaatcagtgcaggcgttgccaccagcagaaccagcagccatccccagttcggcaggagaaagtttgtcgcacgcagtacttttttgttaacgccgcgggtatgagtgaaatgacgattgccacataagaaaatgaccagacccgcgatcatgccaaccgccgccaggccaaagcccatcgcccagctgtactcttcctgggcgtaaccacaggcgataggtgcgataatagaccccacgttacccgccgcatacatcagcgagaaaccgccatcacgacgcggatcggttggctcatacagctcgccgagcagacagcttacgttagatttaaacaggccatagccgcagacgataatcgccagggacagatagaggaatgacggatggatctcactggcacccagcaccacatgaccaatcgccatcaacaacgcccccagcatcaccgccatgcgattgccgagaactttatccgccaaaaagccaccgaggattggcgtgacatacaccagcgaacagtaggcgctaaataactcgtaggcgtgagtatcgttgtattttagttgattggtgagatagagaatcagcagggcacgcatgccgtaaaagctaaaatattcccagatttgcagcgcaacgacatagtaaatagcgcgcggttgtgatgcgtgtttattcataataattccacaattgacggcaacgtcacgtaatagttgcgcggcgtgcttgtgtttccttaaagttaaaactttgatacagatctgattatttatgcaatatgctgtctgattgcataaatatacattagctgaagcgtgatgatataaacaatttgcgtcttttggcgtcgggtttgtttcttaatatgtcaaaagattggctatcgacgaacaggcgaggtaacgctatgttaacggtgtagctatcagaatacggaaggcgcgaagatgaaaaacaccgaactggaacaactgattaacgaaaaactgaacagcgcggcgattagtgattacgcgccgaatggtttgcaggtggaaggcaaagagacggtgcaaaaaattgttaccggtgtcaccgccagccaggctttgctcgatgaggcagtgcgtctgggcgcggatgcggtcattgtgcatcatggctacttctggaaaggagagtctccggtcattcgcggaatgaagcgtaaccgtttaaaaacgttgctggcgaatgatatcaacctgtatggctggcatttgccgcttgacgcacatcctgagctgggcaataacgcacagctggcggcgttactggggatcacggtcatgggcgaaattgagccgttggtgccgtggggagagctgaccatgcctgtgccgggactggaactagcctcctggattgaagcgcgtctgggacgtaagccgttatggtgtggcgataccggacctgaggtggtccagcgcgtcgcctggtgcacgggcggcgggcaaagttttatcgatagtgccgcgcgttttggcgtggatgcttttattactggcgaagtttctgaacagaccattcattcagcccgcgagcagggattgcatttttatgctgcaggtcaccatgccactgaacgtggtggtattcgcgcattgagcgagtggctgaatgaaaataccgatcttgatgtgacctttattgatattcctaatcctgcataacgaataatcagagggatcgaaagtgcaacgagcgcgttgttatctgataggtgaaacggcggtagtgctggaactggaaccgccggtgacgctggctagccagaaacggatctggcgactggcgcagcgtctggtggatatgccgaatgtggttgaagccattcccggcatgaacaatattacggtgattttgcgtaatcctgagtcgctggcgctggatgccatagagcgtttgcaacgctggtgggaggagagcgaggccctggaacctgagtctcgctttattgaaattccggtggtttacggtggtgcaggcggaccggatttggcggtggtcgcggcgcattgcgggttgagcgaaaaacaggttgttgaattgcactcctccgtggaatacgtggtctggtttttaggttttcaaccgggcttcccgtatctcgggagtttgccggaacaactacacacgccacggcgcgctggaccgcgcttactcgttccggcaggttctgtcgggatcggcgggccgcagactggtgtttatccgctggcaacgccgggtggctggcagttgattggtcatacctcactcagcctgtttgatccggcgcgtgacgaacccatcttattacgtccgggagacagcgtgcgctttgtaccgcagaaggagggagtatgctgaagattattcgtgcgggcatgtataccactgtgcaggatggcggtcgtcacggttttcgccagtcgggtatcagccactgcggcgcactggatatgcccgcgttacgcattgctaacctactggtgggtaatgacgccaatgcccccgcgctggagatcacgctcggtcagttaactgttgagttcgaaactgatgggtggtttgctctgacgggtgccggttgcgaagcgcggctggatgataatgccgtctggaccggctggcgattgccgatgaaagcaggccagcgtttaacgcttaaacgcccgcagcacgggatgcgcagttatctggcggtcgcgggtggtattgatgttccgccggtaatggggtcatgcagcaccgatctcaacgtggggattggcgggctggaaggccgtttactgaaggatggtgaccgactcccgattggcaaatcgaagcgtgattttatggaagcgcagggcgttaaacagctgctgtggggcaaccgcattcgcgccttgccggggccggaatatcatgagttcgatcgcgcctcgcaggatgcattctggcgttcgccctggcagcttagcccgcaaagtaaccgcatgggctatcgcttacaggggcaaattttaaaacgcaccaccgatcgcgaactgttatctcacggtttgttaccgggcgtggtgcaggtgccacataacgggcagccgattgtgttgatgaacgacgcacagaccaccggtggttacccgcgtattgcctgcatcattgaggctgatatgtaccatctggcgcaaattccgctcggtcagccgattcattttgtccagtgttcactggaagaggcactgaaagcgcggcaagatcagcaacgttattttgaacaattagcgtggcggctgcacaatgaaaattgacctgaacgccgatctgggcgaaggctgcgccagcgacgcagagctattaacgctggtttcctctgccaatattgcctgtggatttcatgcaggcgatgcgcaaaccatgcatgcttgcgtgcgtgaagcaataaaaaatggtgttgcaattggcgctcacccgagttttcccgacagggaaaattttggtcgcagcgccatgcagctgccgccagaaaccgtttacgcccagacgctgtatcaaattggcgcgctggcaacgattgcccgtgcgcaaggcggcgtaatgcgtcatgtcaaaccgcacggcatgttgtacaaccaggcggcgaaagaagcacaactggcagacgccatcgccagagcggtatacgcttgcgatccggcattgattctcgttgggctggcaggaagcgagctgattcgtgcaggcaagcaatatggcctgacaacgcgcgaggaagtgtttgccgatcgcggttatcaggctgacggctcgctggtgccgcgaagtcagcgaggcgcgttgattgaaaacgaacaacaggcgctggcgcaaacgctggagatggtgcaacacggcagagtcaaaagtatcaccggcgaatgggcaacggtcgcggcgcaaacggtctgcctgcatggcgacggcgagcacgctctggcgttcgcccgccgattacgagctacatttgccaaaaaggggattgttgtcgcagcataaccccgcttaataaagaatgaaaaaaggatatcaccatgcctgaaggcccggagatccgccgtgcagcggataacctggaggcggcgatcaaaggcaaaccactaactgatgtctggtttgccttcccgcagttaaaaacttatcaatcacaacttatcggtcaacacgttacccatgtggaaacgcgtggtaaggcgttgttaactcatttttccaacgacttaacgctctacagccataatcagctttacggcgtctggcgcgtggttgataccggcgaagagccgcagaccacgcgagtattgcgggtaaaactgcaaacggctgacaaaaccattctgctttatagcgcctcggatattgagatgttgaccccggaacaactgaccacgcatccgtttttacaacgcgttggtcccgatgtgctggatccgaatctgacgccggaggtggtaaaggaacggttattgtcaccgcgctttcgtaaccgtcagtttgcaggattactgctcgatcaggcgtttctggctgggcttggcaattatttgcgggtggagatcctctggcaggttgggttgactggaaatcataaagcgaaagatctcaatgcggcgcaactggatgcactcgcacacgcgttactggagattcctcggttttcttacgctacgcgggggcaggtggatgagaataagcatcatggggcgctgtttcgctttaaggtttttcatcgtgatggcgaactgtgcgaacgctgtggcggcatcattgagaaaaccacgttgtcctcgcgcccgttttactggtgtccaggctgccagcactaggccgaccgcttcggcgcataggttgaaataaaccgcgcaatggctggccccgtcagcaaaatactgaacaggcgcagggtttgcatcgccataataagcgccatatcggcattgctccctgcggcgatgaccgccacggtatcaagcccgccgggactggtggcgaggtaggcagtcataaaatcaatatgcataaaccgggtcagtccccacgccatacctgcacaaatagccagcagagcaaaaatcgacagcaggatttgcggtagtgggcgtagtgcccgcagtaagatttgtttatcgaaaccaagaccaatccgccagccaattgccatatacgccatcgccagcagccattccggtagttcgatggtgatgagctgaccagactggagcactgcgcccgccagcatcgggatgagcatcgtgccggaaggaagacgcagcatgcatcccgccgtaccggcaacgactgcgagcaaaatcgtaagcaggagattaatgctcactggcgggaaccagacgatttgctggttaaccgcttcagcgttatcacccagcatcatgcgggtgaccagaacagcggcccccgcgacgaacagcactcgcagatattgcataaacgccaccaggcgaatatctgcgccgtaatcttgcgccatagcgaccattgccgctgcgccgcctggagaagaaccccaggcaccggtatttccaggcagtgagctatagcgcaccaataaccaacccacgatggcgctggaaagcagcgtcaccagtaaaatagcaagcacgatcggccagttggcggccagcgtggtgagaatcgaaccagtgaggttttgcgcaatcatgcagccaagaatggcctgcgcggcgagaaaagcggagcggggaagttgcagagtaattccgcgcatactgaagatgatcccggcgatcatcggcccaagtaatagcgccgccgggagatgtaccgcgaggaaaccaatagaaaggagaagtgatagcacacataacattccccactgcaaaactggcatccttcgctccctcattattttctctttggtgtatcgatacagcataaagaaagccgggccaggaaaaaataacagcaatcaaggaaaaggggaaaatcagcaattttctgaaagagatgccctttccggctgcaaagggcatcatggcaaatcagttatagttaattttaaaaagcaccactgtatcgaagggcccagcctcgatgggggtacctgcaatggacgaaagttcagctgtataggttttttcgtagaccaacatgtcgctggtgaaatcggcgtattcagcatatttattgaaggtataaggcgaggcgttttcatccagcaaacgtagcttcagaccattaccaatcaacaatgctttatcttcttcaaccaacgtttcttcggtataaaaggaggaactgactttaaatccgtcggtgcattggtcattttgtgattttgtcgtcttaatactgaatgttttcgacattgtgtggcgacgaatatccagcaaattaaatttaccaaaatcaatcacctgtgtttccggtgaaatggaaaaattgacgctgcaatccagcacgcgaatgttttccagaccggtaatatgatatttcaggttttgggcagtaggatcttcgttaacgctaccggcaccgtcaaattgcacgacgatatagtcgctaagcgtactttgataatcatgcggcggcatttctcgtattttgacgtataaccgcatgcgagcgagaaaggtacgcgacatgtgaatattagcgggatcacccgagcaaattttgttctgccatcccatcgcgataatctgctcaggggtataaatgtcaatgttcttactgtcaatacactggttagtgtcgatgcggctttttccctggttggcgtcataatcaacgccattgtaagttacgccgagttgataatagcgatcctgcacccccgggtaggggtttacccaggcataaacatgctcactttcaaaattgccgttggtattgttgtcacaatagacgggaattttaatatcgtcagattcccaaatcttatcgccgagtttggcattgcctggtacagcaaaaggttgaatcgcttctgatttttctaccgagccaccggatgaaccaaagtagcagttcagggcaagcgcagacttcaacggcagaaataacagacagatgacgagcaacactcccttgccagcactcatttcttcgcctccacggcttgtaaatggcattgtccgctgcagttgagcgtcgtcatgcgtaacgcgccgtaatcatccatataaccgagataaaactggctgccgctataatttccggtgtttgtgttgaccgtactaaaaggcgcaaccatcacggttttgaagccggggagaacgcctttttcatttcgtcccaggtaggcaatggtcagataatacgcggtaggatttttcagtgtcagttggttgccctgctggctgacctgtaactgcagttcgaccttttctcctgctttcttgcgtaatgcagccggtcgccagaacaccttgatacgactctgaatggcgacttgcagaacggcatggtcgctgtttttttccggggcgggaggaatttcacgcatattgtagaaaaatagcgtttcgcgatcgcccggtaattttgtggtcgaggcttgctttactatccgtacctgcgttgttgctttcggttccagacgttgtatcggcggcagggcgaccagaagatcatcgcttttctcccctttttcattttcgagccaggaataagcgaggtaggggagtttatcgctacgattatccacccgcagactggtagctttatcattagcgttaaacacaatacgagtgcgatcgggttgtagtgcagcgtggctgcacagactggcaaccaacaacaaaaggggtagtcctttcataaatgtcattttcatttccttaattaatgacaaggtaaaatcaggcgatttgcggtgtcttccatatgttcaggaagatggagcgagcaatgctggctatcaccccagaccacggtaaacttttgattttcagcgactccgcttaaccaggcatgtccttcctcgccaaccatccccacgctaatgccgctgtcatcctggcggatatccgctccgaggggaggaaactgaccgctggcgttgcgaatgatgacgttaacgtctttaccggaacgggaagccagtgatttgtaacctatcgcgccttcaatccacgtttctttgataacgttttctgcaactgttacgccgtcgggtaagtcattcatgttcaccgccacggtggaaggctggtaactggaaatcaacggcaccaccgcaatgccaaaatggttggtgtagtcgagattgccctggaccggaatatctgccacgccatcggtgctgaccatcaggcgtggttcattggtggagctgcggcgatgaaacgctgcaccatattgggttgcggtgaaagaaccgctccagctgctgctgacggaactgtaatcattggcggcataggtaccagaaatatcccactcacccgctgaactcagatgctgatagttaccgctcacctgggctccattgtccggacggtcggattgcagtccggcagacatgccccagctattacgttcatccagcgtatcgttccacgacatgcggtgtgtggtgctgtggctactgttttgcatgtcatagccaacccgaccaccgttaccgaaggggagcgaaatcgacaggtaaatctggttgtcgcgatctttatcttcgtaatgggttgtattgaatgacgtcgaaatagagatatctctccagtcaccaatatcaacattaaaacctgccgtgatgttggcggtcgtggaggcgtctgcattccaccaggtttgatgtagcaggttggcgtaaagattgaggtttagtggggtaatcggttggcccacagataagctgatcgtctgtttttcgtcctgcgcatcgctgtcgttgtatttgtgatcaagatagttggcgtagctgtgaaaatgacgatcggagaaacgataagcggcgagggaaatcgtgctgttggtggcatccacttgtttgctgtaattaaaacggtagcttaagccccgctcgtcctgctgagtatcaaaatggctactggcccacgtgacatcaaacgacagcgcaccaagccacagcatattttgcccaatacccattgcggcagaatggtagtcatcaccagaaagcagcaggccgccgtacagcgaggtgtttgacagcatcccccaggaaacttcattgctaaaaaaggtttcattttcagtttgatgtgacatggagggccgtggctgacccgcggccagtttatagcgaacctgtccctgacgagtcaggaagggcgtcgatgctgccgaaacctggaaattgttcacccgaccatcttcttccgtcactttgacatccagtgtgccctgaacagactgattaaggtcgtcaatgataaatgggcctggtgggacttttttctggtaaatgacgcggcctgattgactgatcgtcaccgtggcattggtctgtgcaataccgctaatttgtggggcgtagccgcgtagttcccatggcaacattcgctcgtcacttgccagtgccgcgccggtataagaaaaaccgtcgaaaatattggaactaaaatccgtttcgccgagggttaatttagagcctaattgcggtaatggacgaaaaagataggtgcgcgatattccgcctgactgttcatggttatcatcgctatcagtctgattcaactgataatcactacgtaagcgccatgccccggcgttaattccggtggtaccgtaggcgttcaggttagtgctgctgctgccatcctgtgggcggtagctgctggcaaacaagttgtaatccatcaggacaccggcgacaccttctttccatgtggagggtggggtccagttttctgagtgccacgccagccaggcttgcggaatggtgatatttagttgctgattggcttgatcgaaattgaagagcatttcaggtcgggagctaaaatcgacgcactgatttatcaatggtaacgactgacggacttcaggttttaagccaaatttatcgaccagtaaatcattgatgcacggaatggttttatcgtcatttttgtgccagttaatcttttgcccgttactgatttggttattatttaccgcaacgctaacaaaatactcaccgggagcaatgactcctttttcctttaataatgaaatatcaatgcggtcgcgcattgatttatcgagaacattaaggttgaattcgaccgccaatgcgcaaggcatcgccacgaccaggcaggatacaaaagagagtcgataaatattcacggtgtccatacctgataaatattttatgaaaggcggcgatagcgccgccaaagtaatacttatttataatccagcacgtaggttgcattcgccgtaactgcgcctggcgttacaggtgtagcctgatcaatttgttccatccaggcaaagaaattcagcgtttgttcgctggaggtcggagccaggtcgatatctggagtagcggtgcctaaaacgatattgctttgatctttattcattaaacgtacgccgacgccggtggcttcacccgtgctggtgttgttgagaatcggatctgcgccggtggttttcgctgagctatcaaaggtgactgcaactttagaaatcttgccaccggaaccgttgctggagttttccagatcacagttgactaagcgcaggtcgacagcaacggcatcgctgtgatgtgactgattaatgtggctggtggtcacctgaccgagttcaacctctttatcaatatcatcctgatgtatttcacacggtgcttcaataacttcacctttaaagtgaatttcaccggatccttcatcagccgcataaacaggtgctgtgaacagcagagatacggccagtgcggccaatgttttttgtcctttaaacataacggagtcctttaacagaaaagaaaaaagtatatcggtgcaagaa

SEQ ID NO: 261 - DNA, 16315 bp, Escherichia coli
  source 1..16315: mol_type = genomic DNA
tttccagcccgcgcgatgagccgctggcggtttgccattttctgacaagatacggaactgcgtgccgtgaatatggaacggatgcagcatcatgtcacccacgccagagataacccaacgttcgtactgccctttcgccgccgcaaacatcggcttattcatatcaaacgcctgaccgttgattttattggcatggtggaaatcgaacttcccgccgtggttcatatgattcatattgccgtgccccatatggcccatcatctggctgtgatccatcccggccatcgcctgatcgccatatttctccatcagcatctgcatacccatcatatcgagcatcgggtccatagaaagttgcagcttgcgtaccgtcagcccttccagcgaaggtaacgcaggcaggctacttaatgtgtctggcaaagcaccggaggcactaatagcaatcggctgaatccgcattaccggatgcggcttgtcaaacggcgcaatcgccatccccatctggctgaccggcagcgtcaccaggtcaaagggtttgttgtcgttaacctccaccagcacttcaaaacgctcgcccatcagcaccggcagctcgttcaccttcaccggttcaggtagcagaccaccgtcgctggcaatcacataaagcgggcgattgtcgctggtggcgaaattgagcgagcgggcattacagccattgagcaaacgcaggcgcagccaaccacgcggggcagcgtgttgcgggtagattgcaccgttggtcagcaacgtatcgccaaaccagcccacggcggcggtcatcacatccagttgataatcaatctgcccgtcggcgctaaatttcttatcctgaacgatcaccggaacatcatcgataccccactgttttggcagcattaatttcaggatctcgtcatcttcaattaccaccaacccagccaaccccatcgccacctgtcgcccggtcttgccatgttgatgtggatggaaccagcaggtagcggcaggttgatcaacgttcaacgtcaccgagcgcttgccacctggcggaataattccctgcgggccgccgtccacttcacccggtacttccagcccgtgccagtgcaacgtcgtctcttccgtcagttggttatagatatcaaccgttaccgctttgccgtgctgtaatttcaccgccggccccagcagattgccgttatagccccaggtagttgcagttttcccgccaaaggtggactggcctgcgccaatagttaactgaatgcgattacgggcatcggtcgtgagcaaatcagggatcggtaacgttgggcgttccgccgcaaagactgcgcggctccacagcggcaaggctgaagccacacccagcgcgacggaatattttaagaaatcacggcgttgcatagttatttccttattcttaagcaggcgaaacaaaatcaaacgttgagcatagtccttccccttacgggaaggtcaagccgcagacacaatttaatcgacaataatggtcgtcgcctcgctcgcagtgtgctaacgtttatcttctttaagcccctggtagaagcaatgaagacgtttttcagaacagtgttattcggcagcctgatggccgtctgcgcaaacagttacgcgctcagcgagtctgaagccgaagatatggccgatttaacggcagtttttgtctttctgaagaacgattgtggttaccagaacttacctaacgggcaaattcgtcgcgcactggtctttttcgcccagcaaaaccagtgggatctcagtaattacgacaccttcgacatgaaagccctcggtgaagacagctaccgcgatctcagcggcattggcattcccgtcgctaaaaagtgcaaagccctggctcgcgattccttaagcctgcttgcctacgtcaaataatccctgatacctttttgtagaaatattgaccgtgcatccgcggtcaatgttagctattatgttgcgccctttttttacgggtgttaacaaaggaggtatcaacccatggccgaaaaaaaacagtggcatgaaacgctacacgaccagtttgggcagtactttgcggtagataacgttctgtatcatgaaaagaccgatcaccaggatctgatcatttttgagaacgctgcatttggtcgcgtaatggcgctggatggcgtagtacaaaccaccgagcgcgacgagtttatctatcatgagatgatgactcatgttccgctactgacccacggtcacgcgaaacatgtgctgattatcggcggcggcgacggtgccatgctgcgtgaagtaacccgacataaaaacgttgagtcaatcacgatggtggaaatcgatgcgggtgtcgtatcgttctgccgtcagtatctacccaaccataacgccggtagctacgacgatccgcgctttaagctggtgatcgatgatggcgtcaatttcgttaatcaaaccagccagacctttgatgtcattatctccgactgcaccgatcctatcggtcccggcgaaagtctgttcacctcagcattttatgaaggctgcaaacgttgcctgaatcctggcggtatcttcgtcgcacaaaacggcgtctgctttttacagcaggaagaagccatcgacagccatcgcaaactcagccattacttcagcgacgttggcttttatcaggcggcgatcccgacctattacggcggtatcatgacttttgcatgggcgacagataacgacgccttacgccatctctcaaccgaaattattcaggcgcgttttctcgcttctggcctgaaatgccgttattacaatccggcaatccatacggcagcttttgccttacctcagtatctgcaagacgcactggcttcacagccgtcctaaggagaagataagaaattgaaaaaactgaaactgcatggctttaataatctgaccaaaagtctgagtttttgtatttacgatatctgctacgccaaaactgccgaagagcgcgacggttatattgcttatatcgatgaactctataatgccaaccgtctgaccgaaatcctgtcagaaacctgttccattatcggggccaatattcttaacatcgcccgtcaggattacgaaccacagggtgccagcgtcactattctggtgagtgaagaaccggtcgacccgaaacttatcgacaaaacagaacaccccggcccactgccagaaacggtggttgcccatctcgataaaagtcatatttgcgtacatacctacccggaaagtcatcctgaaggcggtttatgtaccttccgcgccgatattgaagtctctacctgcggcgtgatttctccgctgaaggcgctgaattacctgatccaccagcttgagtccgatatcgtaaccattgattatcgcgtgcgcggttttacccgcgacattaacggtatgaagcactttatcgaccatgagattaattcgattcagaactttatgtctgacgatatgaaggcgctgtatgacatggtggatgtgaacgtctatcaggaaaatatcttccataccaagatgttgcttaaagagttcgaccttaagcactacatgttccacaccaaaccggaagatttaaccgacagcgagcgccaggaaattaccgctgcgctgtggaaagaaatgcgcgagatttattacgggcgcaatatgccagctgtttaacggctctggcggagctcccaggctccgccagatttatttacttctgctgcacgaaattgcggtaagccgccacgacctgcagaaaatcctcaacgccgcatagcgacaggctttcttcgtcgtagtagttcatcccttcttccatttcatcgccagcgaattccagttgattggcgcgaaccatcacctcttcaccgtccatccacagggtgtattcatgccctgcccgttgccaggaccgttcgctacctttcagtgcgtgcgctgcttgttccacttcatcaagcaaagccaggttttctttcacctcttcattaaaccagtgcccgaccacttcatgccccatggacatacgcacctttaccactccggtaatatcgcgcagaaattcgtaatccatagtgtgttcctctgctcccggcaatgcgccgaaatcgcattgcgccattgatgtaattatcgcaaccttaccggagaaaaacagcggaacggcgatggtttagaaataaaaaatgcccgggaatctcattccccgagcattgtgtcgtttatgcgcagcgcgtgcgctgactttttaaaccgcagtctggaaaatcaccccatcggctttttcggtatactgagaaagctggttgaagttcagataacgataagtatcaacggcagttttatccacttgcgccacgtaggtctggtactcttccggcgtcggcagtttgccaatcagcgccgcaacagccgccagttccgcagaagccaggaagacattcgcgccagtacccagacggttcgggaagttacgggtagaggtggaaaccaccgtcgcaccgtctgctacacgcgcctggttacccatacacagggaacagccagggatctcgatacgcgcaccactcttaccgaagacgctgtagtagccttcttcagtcaactgcgcggcgtccatacgggttggcggtgccacccacaggcgggtcggcagttggcctttgtgcgcatccagcagtttacccgcagcacggaagtgaccgatgttggtcatgcaggaaccgataaatacttcgtcgatcttctcaccctgtaccgcagacagcggacgcgcgtcatccgggtcgttcggtgcacagaggattggctctttaatatccgccagatcgatgtcgatcactgccgcgtattcagcatctgcatcggcttccagcagctcaggattcgccagccatttttccatgccctgaatacgacgttccagggtgcgacgatcgccgtaaccttccgcgatcatccacttcagcaggacgatgttagagttcaggtattcgatgatcggttctttgttcagcttgatggtacaaccagcggcagaacgctcagcggacgcatcggtaagctcaaaggcctgctcaactttcagatccggcagaccttcaatttccagaatgcggccagagaagatgtttttcttgcctttcttctcaacggtcagcagaccttgtttgatggcatacagcggaatggcgtgtaccagatcgcgcagggtgatgcccggctgcattttgcctttgaagcgcaccagaacggattccggcatatccagcggcattacgcctgttgcggctgcaaatgccaccagaccagaacccgccgggaaagagataccgatcgggaaacgggtatgggagtcacctccggtaccgacggtatccggcagcagcatacggttcagccaggagtggattacgccgtcacccggacgcagcgacacaccgccacggttcataatgaagtccggcagcgtgtggtgcgtgttcacgtcaactggcttcggatacgccgcggtgtggcagaaagactgcatcaccaggtcagccgagaagcccaggcacgccaggtctttcagttcatcacgggtcatcgggccggtggtgtcctgagagcctacagaagtcattttcggttcgcagtacgcgcccggacgaatgcctttcacgccacaggcacggcctaccattttctgcgccagcgagaagccgcgatcgctctcagcgacatctttcgcctgacggaacacatcactgtgcggcagaccaagtgcttcacgcgctttggtggtcaggccacgcccgataatcagcggaatacggccaccagcacgcacttcatcaatcagcacgtcggttttcagttcgaaggtcgccagcagttcgccggtttcgtggttacgcacttcacctttgtacgggtaaacgtcaatcacgtcgcccatgttcaggttagagacgtcgacttcgattggcagtgcacccgcgtcttccatcgtgttaaagaagatgggtgcaattttaccgccgaggcacaaaccaccgccgcgtttgttcggcacatgtggaatatcatcgcccataaaccacagaacggagttagtggcggatttacgcgaagaacccgtacccacaacgtcaccgacgtacgccagcgggaaacctttctgttgcagagcttcgatttgcttgatcggaccaacaacaccaggctggtctggctcaataccttcacgggcgtttttcagcatcgccagcgcgtgcagtgggatatccgggcgtgaccacgcatccggtgccggagaaaggtcatcggtgttagtttcgccagtgactttgaagacagtaacggtcagtttttcagccagcgccgggcgattcaggaaccattcggcatccgcccaggactgcataacctgcttcgcatattcgttgcctgctttcgctttctcttctacgtcatagaagttatcgaacatcagcagcgtgtgagaaagtgctttggcagcaataggtgccagtttggcatcatccagcgcgtcgatcagcggatgaatgttgtaaccaccctgcatggtgcccagcagttcgatggctttttccggagtcagcagaggggatttggcttcgcctttcgcgatagcagccaggaagcctgctttgacataggcggcttcatcgacgcctgggggaacacggttggttaacagatctaacaggaattcttcttcgcccgcgggcgggtttttcagcagctctacaagtgcggccatttggtttgcatccaggggtttgggcgcaatcccctcagcggcacgctcagctacgtgcttacggtattcttctagcacgacggttctcctcgctctcattgtcatagtgcggcaggcgattctcttcacgctcctgtgagacagcagtttgtagggtaaatgcccagtaccgcaacgggcagaatagcaggattttgacgatgtgttaatctgtttacaaaaaagcaacataaaaaagtggctgaatcgttaaggatggtctagagattgtttccctccgtaaaaacttcgttaattcgcatggtgataatcacctttctcaacgaatcccaagattagtcaaaatttaaactaccgcctctttatactcggattcacagcacctgcgggtggcagttcgccgaccattgcgatttccttgagatccgaattatgaaaatgactttgccgtttaaaccccatgtgctggcgctaatttgcagtgccgggctttgtgccgcctctaccgggctatatataaaaagccgcacagtggaagcgcctgtggaaccgcaatcgacacaacagactgcgcctgacatcaccgcagttacgcttcctgcaacggtttccgcaccgcccgtaacgcccgccgtcgtcaaatccgcattcagcactgcacaaatcgatcaatgggttgcgcctgtcgcgctgtaccccgattctctgctttcacaagtgttaatggcatcaacctatccggcaaacgttgctcaagcagtgcaatggtcgcacgataatccacttaaacaaggcgatgctgctattcaggcggtatctgaccagccgtgggacgccagcgttaaatcactggtggcctttccacaattgatggcattgatgggcgaaaacccgcaatgggtgcaaaacctgggcgatgcttttctggcgcagccgcaggacgtgatggactcggtacagcgattgcggcaactggcgcaacaaaccggttcgctgaagtcatcaaccgaacaaaaagttattaccacaacgaagaaagctgtaccggtaaaacagacagtcacggcacccgtcataccatccaataccgttttaactgccagccccgtcattacagagcctgcaacaaccgtcatttccattgagcccgccaatcctgatgtggtctatattcccaactacaacccaaccgtggtttacgggaactgggccaatactgcgtatccgccggtttatctgccaccaccagccggagaaccgtttattgacagctttgtgcgcggattcggctatagcatgggtgttgctaccacgtacgcactattcagcagcatcgactgggatgacgacgatcatgaccatcatcatcgtgacggtaatggctggcaacacaacggcgacaacatcaatatcgacgtcaacaatttcaaccgtatcaccggtgagcatcttactgataagaatatggcatggcggcacaatccaaactaccgtaatggtgtgccctatcatgatcaggatatggcaaagcggtttcatcaaaccgatgtcaacggcggaatgagcgccacgcagctacctgctccaacacgcgacagccagcgtcaggcggcagcaagtcagtttcagcaacgaacacacgccgcccccgtcattacacgagatacccaacgtcaggcagcggcacagcggtttaatgaagctgaaaactatgggagctatgacgacttccgcgacttcagccgtcgccaaccactgacccagcaacaaaaggacgccgctcgtcagcgttatcagtcggcctcgcctgagcagcgccaggcagtccgcgagaaaatgcagactaacccacagatccagcagcgaagagacgcagcgcgtgagcgtattcagtcagcctcgcctgagcagcgccaggtgtttaaggaaaaagtacagcagcgcccactgaaccaacagcaacgtgataacgcccgccagcgtgttcaatcagcatcacctgaacaacgtcaggtttttcgggaaaaagttcaggagagccgcccacaacgtctaaacgacagtaaccatactgtcaggctgaataacgagcaacggtcagcagtacgcgaacgtctctctgagcgcggagcaaggcgacaggaaaggtaaattgcagacgtaaaaaaagcggcgtggttagccgcttttttaattgccggatgttccggcaaacgaacaattacttcttcttcgctttcgggttcggcaggtcggtaatgctaccttcgaacacttctgccgccaggcccacagactcgtgcagagtcgggtgcgcgtggatggtcagtgcgatgtcttcagcatcacaacccatttcgattgccaggccgatttcacccagcagctcgccgccgttggtaccgacaatcgcaccaccgatcacacggtgagattctttgtcgaaaatcagcttggtcataccgtctgcgcagtcggaagcgatagcacgaccagaagcagcccacgggaaggtggcggtttcatagctgatgcctttctctttcgcttctttctcagtcagacctacccatgcaacttctggttcggtataggcgatggacgggataactttcggatcgaagtagtgtttcttaccggcgataacttcagcggcaacgtgaccttcgtgaacacctttgtgtgccagcatcggctgaccgacgatatcgccgatagcaaagatgtgcggtacgttggtacgcagctgtttgtcaacgcggatgaaaccacggtcgtccacttccacgccagctttgcctgcgtcgaggtttttaccgttcggcacacgaccaatcgctaccagcacggcgtcgtaacgctgcggttcagnnnnnnnnnntgcttttttgccttccatcgtcacataaataccgtcttctttcgcttcaacggcggtaactttggtttccagcatcaggttgaatttcttgctgatacgcttggtgaagactttaacgatgtctttgtcagctgccgggataacctggtcgaacatttcaaccacgtcaatctgtgaacccagcgcgtggtatacggtgcccatttccagaccgatgataccgccacccattaccagcaggcgttctggtacttctttcagttccagcgcgtcagtggagtcccagatacgcggatcttcatgcggaataaacggcagttggatcgggcgagaacccgctgcaatgatcgcgttgtcgaagttgatcacggttttaccgttctcaccttcaacttccagggtgttagccccggtaaatttacccagaccgttgaccactttgactttgcggcctttcgccataccagccagaccaccggtcagctgattgatcactttctctttccaggtacgaatcttgtcaatatcggttttcggttcgccgaagacgataccgtgttcagccagcgctttggcttcttcgataacttttgctacgtgcagcagtgctttagaagggatacagccgacgttcaggcaaacaccgccaagggtgttgtaacgttctacgattacggtttccagacctaaatcagcgcaacggaaggcagcggagtaacctgcggggcctgccccaagtaccacgacctgagttttgatttcagtactcatcatgacctctatatatttatctccggcgggtctgacgttttttttatgacgcccattatccaccgggtcgttctatccgtcggtattttacaaaattgttaacaatttttaaacaacaaacggcaaccgatttgtctattcgctaataacctcaatacattcatgagattaccagaaaaaagccggccgttgggccggctcttttacttacatcaccagacggcgaatgtcagacagcgtgttgttaatgatggtaatgaaacgggcaccatcagcaccgtcgatcacgcggtggtcgaaggagagagaaatctgcagcatcagacgcggcacgaactctttaccattccacaccggctccatcgcggacttggaaacgccgaggatagccacttccggcgcgttcacaatcggcgcgaagtgggtagtacccaggccgccgatgctggagatggtgaagcaaccgccctgcatttcgcccgcagtcagcttaccgtcacgcgctttcttagaaatagtcatcagctcgcgagacagctcgatgatgcctttcttgttgacgtctttgaataccggaacaaccagaccgttcggggtatccaccgccacaccgatgttgatgtatttcttcagggtcagacgctgaccgtcttccgacagcgaactattgaagcgaggcatctgctcaagagctgcagcaacggctttcatgatgaagacaaccggggtgatcttcacatccagcttacgtttcgccgcttcttcgttctgctgtttacggaacgcttccagctcggtgatatcggttttgtcgaagtgagtaacatgcgggatcatcacccagttacggctcaggttcgcaccagaaattttctggatacggcccagttccacttcttcgatttcaccaaacttgctgaagtccaccttcggccacggcagcatgcctgggataccgccgccagtcgccgccggagctgcttctgcacgtttgatagcttctttcacgtaagcctgaacgtcttcgcgcaggatacgacctttacggccagtgcccttcactttcgccaggttaacgccaaactcgcgtgccagacggcggatcagcggagtcgcgtgaacgtaagcgtcgttttctgcaaattcagatttgccttccgctttcgcagccggtgctgctgccggagcttcagcttttgctgccggagccggcgctgccgcttcctgtttcgcaggagctgccgcaggcgctgcgccttcaacttcgaagatcataatcagcgagccagttttcactttatcgccaacgttgactttcagttccttcacgacgcctgcaaacggagccggaacttccatagaagctttgtcgccttctacggtaatcagtgactgttcagcggcaactttgtcgcccactttcaccatcacttcggtcacttcaacttcgtcaccgccgatatccggaacgttaacttctttcacgccagccgctggtgcaggggccgctgccggagccgcttcctgtttagccgccggagctgccgcgcctgcttcacccgcgacttcgaagaccataatcagcgagccggtagacactttgtcacccacgttcactttgatctctttcacggtgccagcaaacggagccggaacttccatagacgctttatcgccttctacggtgatcagcgactgttcagcttcaactttatcgccaactttcaccaggatttcggtcacttcaacttcgtcgctgccgatatccggaacgttaacgtcttttgccgctgcagccgctggtgctgctgccggagctgcttctttcttctcttctgcctgagcaggtgcagcgtctgctgcaccgtcggcggaatcgaaaatcataatcagtgcgccggtctgggttttatcgccaacagagactttgatctctttaacgatacccgcctgcggagacggaacttccatagaggctttgtcgccttctacggtgatcagcgactgttcggcttcaactttgtcgcccactttgaccaggatctcggtgatttcaacttcatcagccccgatgtccggtactttgatttcgatagccattattcttttacctcttacgccagacgcgggttaactttatctgcatcgatgttgaatttggcgattgcgtcagcaaccactttcttatcgatttcgccacgtttagccagttcgcccagcgccgctacaaccacgtaggaagcatcaacttcgaagtggtgacgcaggttctcacggctgtcggaacgaccgaagccatcagtacccagtacgcggtagtcgtcagccggtacgtaagtacggacctgctcagcgaacagtttcatatagtcggtagatgccactgccggagcgtcgttcatcacctgagcgatatacggaacgcgcggagtttccagcgggtgcagcatgttccagcgttcacaatcctgaccatctcgcgccagttcggtgaaggaggtcacgctataaacgtcagaacctacgccgtaatctttcgccaggatctctgccgcttcacggacgtgacgcaggatggaaccggagcccagcagctgaactttacctttgctaccttcaatggtttcgagtttgtagatacctttacggataccttcctcagcaccttccggcattgccggcatgtggtagttttcgttcagcgtagtgatgtagtagtaaacgttctcttgtttttcaccgtacatacgctccagaccgtcatgcataatgacagcaacttcgtaagcgtaagccgggtcgtaagagatacagttcgggatagtcagcgactgaatatggctgtgaccatcttcgtgctgcagaccttcaccgttcagggtggtacgaccggaagtaccgccgatcaggaagccacgcgcttgctggtcgccagccgcccagcacagatcgccgatacgctggaagccgaacatcgagtaatagatgtagaacggaatcatcggcagattgttggtgctgtaagaggtcgccgctgccagccaggaacaacctgcgcccaactcgttgatcccttcctgcagaatctgacctttctcgtcttctttatagtaagcaacctgctcgcggtcctgcggggtgtactgctgaccgttcgggctgtaaataccaatctgacggaacagaccttccataccgaaagtacgcgcttcgtcggcgatgatcggtaccagacgatctttgatcgacttgttcttcagcattacgttcagggcacgaacgaaagcgatagtggtagagatctctttgctctgctcttccagcagcgcgccgaagtcttgcaggctcggcagctcaagcttctcggtgaagttcggctgacggcttggcagataaccgtgcagtttctgacgctgtgcgtgcagataggtatgctcttcagaaccttccgggaaggtgatgtacggcagtttttcgatatctgcatcagacaccggcacattgaaacggtcgcggatgtgacgcacgccgtccatgttcattttcttaacctggtgcgcgatgtttttaccttcagccgcgtcgcccatgccgtaacctttaatggtatgagcaaggattactgtcgctttgcctttggtttcctgcgctttcttgaatgcagcgtagattttcttcggatcgtgaccaccacggttcagtgcccagatctgctcgtcagtccagtctgcaaccagtgctgcggtttcaggatatttaccgaagaagtgttcacgaacgtacgcaccatctttcgatttgaaggtctggtagtcgccgtcaacggtttcgttcatcagctggatcagtttaccgctggtatctttacgcagcagttcatcccaacggctaccccacatcactttgatcacgttccagccagcaccttcgaagatgccttccagttcgttgatgatcttgccgttaccggtgaccgggccgtcaagacgctgcaggttacagttgataacgaagaccaggttatccagtttttcacgggtagcgatggtgatcgcacctttggattccggttcgtccatttcaccgtcgccgaggaacgcgtaaacggtctgtttagaggtatctttcaggccacggtgttccagatatttcaggaatttagcctggtaaatagcaccaatcggccccagacccatagatacggtcgggaactgccagaattccggcatcagtttcgggtgcggataggaagagaggccattgccgtgaacttcctgacggaagttatccagctgctcctgagtcagacgaccttccaggaaagcacgagcgtacacgcccggggagatgtggccctggaagtaaaccaggtcgccgccatcctgctcgttgcgtgcacggaagaagtggttaaagcacacatcataaatggttgcggaagactggaaggacgccatatggccgcccagttcgaggtcttttttcgacgcacgcagcaccgtcatgatggcgttccagcggatagctgaacgaatacggcgttccagttccagattacccggatactccggttgttcttcaacggggatggtgttgatgtagttgctgatacctgtgcctgcggctacgtttacaccgcctttgcgggcttcagcaagcagttggtcgatcagatactgagcacgctcaacaccttcttcacggatgaccgattcgatcgcctggagccagtcgcgagtttcgatcggatccacgtcatttgggaaacgttctgacatgggttattccttatctatctaataacgttgagttttctggaacctgtcccattgaactctcgccggaaagctcaataagacaggttctacgtttagttgccgcgcttttatatgcgcttgatttacaacatcttctggataatttttaccagaaaaatcactaattctttcgttgctccagacgacgcagagaacgctcacggcggctctcttcacgacttctgtcgagcaaaatttcttcgataaaggccagatggcgatgcgatgcttcgcgcgcttcttccggcttaccggccataatcgcttcaaatatgcgggtgcggtgactactcaccagcggcagcatctcgcgacgcgaatagagcaattcgaagttctggcggacattctgggccaacatcggctccatacaccttagcagatgaagcagaaccacattgtgggccgcttcggtgacggcaatctgatactggagtacggcgtttgattccgcgtccagatcgccagactgctgcgccagctctatggcgtggtggagttcacggatgcgttccttgtcttcatcggtactacgcagcgcggcgtaataagcggcgataccttccagggcgtgtcgtgtttcgagcaagtcatactgtgactcaggatggtcggagagcagctccaccagcggatcgctgaagctttgccataggctgctctggacaaaagtgccgccaccctggcgacgaagcaacaagcccttcgcttcgagacgttgaatcgcctcacgcaaggagggacgggagacgtcaaactgttttgccagttcgcgttccggtgggagtttttcgcccgggcggagagtgccttcgaggatcaaaaactccagttgctgctcaatcacatcggagagttttggttggcggattttgctgtaggccatgagttcctgtcttaagccacttgccgaagtcaattggtcttaccaatttcatgtctgtgacgctaaagtaacaaagtattcaccttatgtccatacaggttttgattgaaatcatgaaactgtgcacattttaacaacttgacatatataacgtttcaaag

SEQ ID NO: 262 - DNA, 16216 bp, Escherichia coli
  source 1..16216: mol_type = genomic DNA
atactggttttaacttattaaataaaaagtgagggattgcgcagtcagcgatccccgataacgtcgccgataaagatgccgggtaacaggcaaaagggaattcccctgtcgcttcgtgtctgcttccgcgacggctgttaagcaaggaatagataatgactaaaaaaataagcgtaagaaaagatcagctggcattactctccagaaacggcgattactacaaagtgctacatgcaggcgagcatcttttaccctggttaaatacgccagaagtcttgctgattacgctcgatggcagcgaagttcccgacgtgctggcggattatttgcgccgctttcagcctgattgggtggagaaatattgcctggtggcagacttgtcggagattgaagccggggcgttgtatatggacggtattttgcaggagatcctgccgccatcaacgcgccgtttgtactggcgtgtagaggatgatttgacactggtgcggatgaatacgcagcaagtccaggtacaaacggaggtgatgaatgcggtattgcaaccacggcgcaaaggggcagttaaaggccgcgatgcaatactaacggtgcaggttccggcctggcatgtaggcgtgctgaaaatcgatggtgaaacgcaggcgctgttaccgccggggctgaccgcatactggaaaattaaccatctggttgacgctgaagtggttgacacccgcttgcaggtactggaagtcagcgggcaagaaatcttaacgaaagataaggtcaatctgcggattaacctcgccgctaactggcgctacagcgacgtgttattggcatttagccagttaacgaagccgattgatcatttgtatcgggaattacaatttgccctgcgtgaagcggtaggtacgcgtacgttggatgaattgctggaagataaacaggtcattgatgacgttgtcagcgaacaggtgaaatcgcgcatgttgccatttggtatggagattgcctcgttaggggtgaaagatatcgtcctgcctggcgatatgaaaaatatccttgcgcagctggttgaggcggagaaatccgcgcaggccaatgtgattcgccgacgtgaagaaacggcagcgacgcgttcgttactcaataccgctaaagtcatggaaaacaacccggtagcgttacgcttaaaagaactggaaacgctggagagagtggctgaacggatcgataacatctctgtatttggcggtctggatcaggttctgcatgggttggttaatatcaaagggtgagtaacatgccattaaatggagtcagtgctgcgatgcgagaaagggtatcgcagcagttaaaagaaattgaacggcggtatgatgtgaaagtactgtacgcctgtgaatcagggagccgcggctggggatttgcctcgcccgacagcgactacgatgtacggtttttgtatgttcacccgctggaatggtatctgcgagtagagtcaccgcgcgatgttattgagctgcccatcgacgacgagttagatgtttccggttgggagtggcgtaaggcgctgggattattgaaaggcgcgaacccgacgctgatagaatggctggattctccggtggtttatcaacaagatgaagaaacgataacggcgtttaaggcaatggtcccaatgtggttttctccgctgcgtgcgcgctggcattactattcgatggcgcagaaaaacttccccggatatttgcagggcgacgaagttcgactgaaaaaatacttttacgtgctgcgtccgctgctggccgtgcgctgggtcgaagcgggtaaaggcgtaccgccaatgcgctttgctgagttactggcgggaagcgaacttgatgcgccgttacgtgcagaaatagacgaattactggaacgtaaacagcgcgcaggagaagcggaatatggtccgcgccgtccattgttacatgcgtttattcgtgcggaactggcgcgtggggaaattccaccgctgttaccggatagcagagaaggggacgttaaggaactggatagcttaatgtaccagacggtaatgcgccgggcataaagcccggcgttatttcacgccatcagctcttattattattgtgtattcccgctgatttcattctgtataagcgttgcaatatcgtcattcgttgccgcttgtgaactaaatatcatcttctcacgcgaatacaccgcaaacttatctgccaggtttgaagcaaacaccttgcgggcattttctgccagcaaaccggtgacgatatcatggtggtttttatccacttttcgggcaatatttcccgcctctttgtccttattataccgttcattggtgctttcccagcttaatgccgctgaggttgtttttatcatgacttctgtttggtagcctgcatctttgagtttttttaatgtttgtaacggcgtagcggcattacgaaatgttccttcgacaacaatgttgagtttactgactatcgctctctcaattgcacgttcgaccgtttcgccggaaaatttcgctgtatgggtaacaaaatcatccccataattttggtagatatgattaaaatcagggtgtagaaatcgaaaatcatcaccgttaataatcattatattatcttttgtctctcttttggctaattcaatcagagatgatttacctgctccgggttgcccacctaaaacaaaaccaatgggatgctgttgcggtgtgacttcatgatttgtcagacgctgccaaatagaatcaaaagatgctttattttctgaatgcgtagtattgttgaattcatgctgatattgagttcttacctgctgaaggagaatcttaccttgtgtaaaatcaacaagttcagcgggggtagaataaagataatcgcgatagctgactaatcgcttgagagcatcgcctgaatcctgatgcgacgaaactgagcaattatcaatgatatttgataaaaacgcgatgcactgactggctccgtttaaaagtgcatctttttccattaaagtagccattaacactcctgttaaatgatatttttcggtgattataatactgttctacaggagtgattttgcttttcagatattatttaatctatgttttcagtgaggatggcgtataacaatcggtgagcgttatacgccagtagggaaatattactcaaacaaattaaaatgcagcttctgcaccacctgctcggcatcttcgccgggcaccaggaagcacaggttatggctggatgcgccgtaacaaatcatgcgaatgttgaacggttccagtacgccgaatacctctttgccaacgccgcaggcttttgacaggtcattgccaatcaacgcgaccagcgccagaccttcttccacctccacccggcacagtgcggaaagctccatcagcagagattgcgtcagcaacgtatcgccagtggaggttgaaccggtggtatcaagggttaatgccacgctcacttctgacgtggtgattaagtctaccgaaatattatgccgcgcgaggatgccgaaaacttccgcgaggaaaccgcgagaatgcagcatattcaggctgtgcaaagtgagcagagtctgattgcgacgaagcgccagcgcgcggaacagcggcggattttcagttttattgcacaccagcgtaccacctgcgcgtgggtctttgctggagccgacaaagaccgggatatcgctgcgtactgcgggtagcaacgttgccggatgcagtacttttgcaccaaaagttgccatctctgccgcttcggcaaacgcgatttcatcaatgcgttttgctgcggaaaccacgcgtggatcggtggtgtagatgcccgggacgtcggtccagatatcaacacgagatgcgtgtaaagcctccgccagcaaggctgccgtataatcgctgcctccacggccaagcgttgttgtacgacctttattttcgctaccgataaatccctgggtgatcactaagccttcattgaggcgtgggagcagctgcaccgcggccagttccgccagcgcggctacatctggctctgcacgaccaaatcggtcgttggtacgcatcactttacgtacatcaaaccactgtgcctgaacatcgcgttcgcgcaggatttcgacaaacagcagggtcgacatcagctcaccgtggctgaccagttcatctgtcagcgccggagacgttgccagcgccgccgcttctgccagaacagtaatgttctctagtagacgttcaatctcttcacggataacgttcgggtaacgcagacgttccagaatggcaaactggatattgcggatagcgtcgagtttttcgaatcgctcgccaggttccagtccttcagctaaagcgaccagcagattagtgataccagcagaagccgagaggacaactaaacgcacgttggcatcagaaagcacaatatcagcgctgcggttcatggcgtcaaaatcagctacgctggtaccgccaaatttggagacaacaatttcagacataactacctcgtgtcaggggatccattttcagccttggcacaagggaagagcggaagacgggtgggcgcagagcgatacttcgctactattttcacccagaagtgctccaccacttgcgaaacgcccgactgcgaacgcttctggtgacaacccaggggattcagcccctgtagccgatgatgaacgtggccagccgttcaatcacctcggcgatgcaccccctcaggtgttatcacaggactggctcctccaacaccgttacttgggcaacgcgcctcttctggcctgcgctagcgcaggtagtacatttataaataaagggtgagcggggcggttgtcaacgacggggtcatgcggatttttcatccactcctggcggtcagtagttcagctaataaatgcttcactgcgctaagggtttacactcaacattacgctaacggcactaaaaccatcacatttttctgtgactggcgctacaatcttccaaagtcacaattctcaaaatcagaagagtattgctaatgaaaaacatcaatccaacgcagaccgctgcctggcaggcactacagaaacacttcgatgaaatgaaagacgttacgatcgccgatctttttgctaaagacggcgatcgtttttctaagttctccgcaacattcgacgatcagatgctggtggattactccaaaaaccgcatcactgaagagacgctggcgaaattacaggatctggcgaaagagtgcgatctggcgggcgcgattaagtcgatgttctctggcgagaagatcaaccgcactgaaaaccgcgccgtgctgcacgtagcgctgcgtaaccgtagcaataccccgattctggttgatggcaaagacgtaatgccggaagtcaacgcggtgctggagaagatgaaaaccttctcggaagcgattatctccggtgagtggaaggggtataccggcaaagcaatcactgacgtagtgaacatcgggatcggcggttctgacctcggcccgtacatggtgaccgaagcactgcgtccgtacaaaaaccacctgaacatgcactttgtttctaacgtcgatgggactcacatcgcggaagtgctgaaaaaagtaaacccggaaaccacgctgttcctggtagcatctaaaaccttcaccactcaggaaaccatgaccaacgcccatagcgcgcgtgactggttcctgaaagcggcaggtgatgaaaaacacgttgcgaaacactttgcggcgctctcaaccaatgccaaagccgttggcgagtttggtattgatactgccaacatgttcgagttctgggactgggtcggcggccgttactctttgtggtcagcgattggcctgtcgattgttctctccatcggctttgataacttcgttgaactgctttctggcgcacacgcgatggacaagcatttctccaccacgcctgccgagaaaaacctgcctgtactgctggcgctgattggcatctggtacaacaatttctttggtgcggaaactgaggcgattctgccgtatgaccagtatatgcaccgtttcgcggcgtacttccagcagggcaatatggagtccaacggtaagtatgttgaccgtaacggtaacgttgtggattaccagactggcccgattatctggggtgaaccaggcactaacggtcagcacgcgttctaccagctgatccaccagggaaccaaaatggtaccgtgcgatttcatcgctccggctatcacccataacccgctctctgatcaccaccagaaactgctgtctaacttctttgctcagactgaagcgctggcgtttggtaaatcccgcgaagtggttgagnnnnnnnnnnatcgcgatcagggtaaagatccggcaacgcttgactacgtggtgccgttcaaagtgttcgaaggtaaccgcccgaccaactccatcctgctgcgtgaaatcactccgttcagcctgggggcgttgattgcgctgtatgagcacaaaatctttactcagggcgtgatcctgaacatcttcaccttcgaccagtggggcgtggagctgggtaaacaactggcaaaccgtattctgccagagctgaaagatgataaagaaatcagcagccacgatagctcgaccaatggtctgattaaccgctataaagcgtggcgcgattaatttaaaaaccttaataacaatgccgacgttatgtcggcattgttttatcagataaatccccttgtctgtgatttaacggaaatcataccgtgaggttaatcctaaaatagatttttaatcgtgattgatttcggaaaatactcagattaattacttttacttttattttaacattatgatttttaatgttatttatatataagttgtagcttatatttgatattcattccaattatcctaaaaccccatctctaattccccgcgccgtaattcgcatgctttagttgtgtatactcgatcccgcccgaaatgtttttgggtaaatctccattcattcaatgaagggaaattgttatgaaaaaagttctgtatggcatttttgccatatctgcgcttgcggcgacttctgcgtgggctgcacctgtacaggtgggcgaagcggcagggtcggcagcaacgtcggtttcggcggggagttcctccgcgaccagcgtcagcaccgtaagctcggcggtgggtgtcgcgctcgcggcaaccggtggcggtgatggttctaacaccgggaccaccacaaccacgaccaccagtacccagtaataaagtatgtatccccaaaataatttgagtcattgcatctgtggcttgaagtatgaagggatttaccataaccacactccggtgtggttattctgcccctctggagaagagtcgtgaagcgacctgcactcattcttatctgcctgctattacaggcctgttcagccacgactaaagagctgggcaattcactgtgggacagtctgttcggcacgccaggcgtacagctgacggacgatgatattcaaaatatgccctacgccagccagtacatgcagcttaatggcgggccgcaattgtttgtggtgctggccttcgctgaagacggacaacaaaaatgggtcactcaggatcaagccactcttgtcacacaacatggtcgtctggtgaagactttgcttggcggcgacaacctgattgaagtgaataaccttgccgccgacccgctgattaaacccgcacaaattgttgatggtgcaacatggacgcgcacgatgggctggaccgagtaccagcaggtacgctacgccaccgcacgctcagtcttcaaatgggatggcaccgataccgtcaaggtcggcagcgatgaaaccccggttcgcgtgctggacgaagaagtctccaccgaccaggcgcgctggcataaccgctactggatcgacagcgaagggcaaattcgccagtcggaacagtatctcggcgcggattatttcccggtgaaaaccactctcatcaaggcggcaaaacaatgattaaacaaactattgtcgcattgattttgagtgtgggggcgtcatcggtcttcgcggcgggaaccgtcaaggtattcagcaatggcagcagtgaggccaaaacgctgacgggcgcagagtatttaatcgatctggtaggccagccgcggctggcgaatagctggtggcctggtgcggtgattagcgaagagctggcaacggcggcagcattgcggcagcagcaggcgttgctgacacggctggcagaactggctgcagattccagcgccgacgatgccgccgcgattaacgccttacgccagcaaattcaggcgttgaaagtgacgggcaggcaaaaaatcaatcttgatcctgatatcgtccgcgttgccgaacgcggtaacccaccgttgcagggcaactacacgctgtgggtcgggccaccaccgtccacggtcacgctgttcgggcttatcagccgtcctggcaagcagccattcactccaggtcgcgacgtggcgagctatctctctgaccagagcctgctcagcggtgcggatcgcagctacgcgtgggtcgtttacccggacggacgcacacaaaaagcgccggtggcttactggaacaagcgtcacgtagagccgatgcccggcagcattatttatgttggcctcgcggactccgtctggagtgagacgcctgatgcccttaacgccgacattcttcagactctgacgcagcggataccccaataatgaaaaaaagacatctgcttagcttactggcgctgggcattagcacagcttgctacggcgaaacatatcctgcgcccattggtccgtcgcagtcggatttcggtggcgtaggattattacaaacgcccaccgcgcgcatggcgcgggaaggggagttgagcctgaactatcgagataacgatcagtaccgttattactcagcttcagtgcaactcttcccgtggctggaaacaacgctgcgctacaccgacgtgcgcacccggcagtacagcagcgtcgaagcgttctctggcgatcaaacgtataaagataaagccttcgatctcaaactgcgtttgtgggaagagagttactggctgccgcaagtggcggttggtgcgcgggatatcggcggtacggggctgtttgatgcggaatatcttgttgccagcaaagcctgggggccgttcgattttacgctcggcctgggctggggatatctgggcaccagcggtaatgtgaaaaatccgctctgttcagccagtgataaatattgctatcgcgataacagctacaaacaggcgggatctatcgacggtagccagatgttccacggtcctgcctcactgtttggcggcgtggaataccagacgccctggcaaccgctgcgcctgaaactggagtatgaaggcaataattatcagcaggattttgccgggaagctggagcaaaaaagtaagtttaacgtcggtgcgatttatcgcgttaccgattgggccgacgttaaccttagctatgaacgtggcaacacctttatgtttggcgttacgttgcgcaccaactttaacgatctgcgcccgtcttacaacgataacgcccgcccgcaatatcaaccgcagccgcaggatgccattttgcagcattcggtggtggcgaatcagttaacgctgttgaaatacaatgccggacttgccgatccacagatccaggcgaaaggcgatacgctgtatgttaccggcgagcaggtgaaatatcgtgattcgcgcgaagggatcatccgtgctaatcggatcgtgatgaacgatctgccggatgggatcaaaacgatccgcattacggaaaatcgccttaacatgccgcaggtgacgacggaaacggatgtcgccagcctgaaaaatcatctcgccggagagccgttgggccacgaaacgaagctggcgcaaaaacgcgtcgagccagtggttccgaagtccaccgagcagggctggtatatcgacaaatcgcgctttgatttccatatcgatccggtgctgaaccagtcggtcggtggcccggaaaacttttacatgtatcagctgggcgtgatgggaacggcagatttgtggctgacggaccatctgctgaccaccggcagcctgtttgcaaatcttgccaacaactacgacaagtttaactacaccaatccgccgcaggactcgcacttaccgcgcgtgcgtacccatgtgcgcgagtatgtgcagaacgatgtctatgtgaataacctgcaagccaactacttccagcatctgggcaacggcttctacggtcaggtctacggcggctatctcgaaaccatgtttggcggtgcgggggctgaggtgttgtatcgcccgctggacagcaactgggcgtttggtctggatgccaactacgttaaacagcgcgactggcgtagtgcaaaagatatgatgaaattcaccgactacagcgtgaaaaccggacatctgaccgcctactggacgccatctttcgctcaggatgtgttagttaaagccagcgtcgggcagtatctggcaggggataaaggcggcacgctggagatcgccaaacgctttgatagcggtgtggtggtgggtggctatgccacgatcacgaatgtttcgaaagaggagtacggcgaaggggacttcaccaaaggcgtgtatgtctcggtaccgttggatctcttctcgtctggcccgacacgcagccgtgcggcaattggctggacgccgctgacgcgtgacggtggtcagcaacttgggcgtaagttccagttgtatgacatgaccagcgaccgtagcgtaaatttccgctaagtcatgggaaaggtgccagttttcgcactcactggcaccttcattcttaatggcctgtcgagccatcaggaacgcagttcacccccggtttgcgatctggtgtgtaaaggcgaaaacattctgtcttcctgtccgtcgatattggttgcaggtctggttgcctgagcgactgggccatcattgggctggagacattgctttgcggtaggtcggctttatcagcagtaccgagcggaccagcataagcaggaagaacagagactgataacatcaaagcagcaaaataaggcttcatttttaccacctttatcaggttacgtttcatttgttccagaggaacattgtcgatttttcgcgcattgctggtggctgggaatcacctgaatgggtgatttttgaattaccggctttggtgcggtttgtcttgccggatgcgccgccaggcgcggcttatccggtctacgggtaggtatatccggctttggtggaggcgcgctccaaatccaggttgaacaaaacatacacaaaaaatatagatctccgtcacatttttgcgttatacaggaagctcgccactgtgaaggaggtactgctatgacgtcactctctcgtccgcgcgtggagtttatctccaccattttgcagaccgtactcaatcttggcctgttgtgcctcggcctgattttggttgtcttcctcggcaaagaaacggtgcatctggctgatgtgctattcgcgccagaacaaaccagcaaatatgagctggtagaaggactggtggtttactttctctatttcgaatttatcgcgctgattgtgaagtactttcagtccggttttcacttcccgctacgttactttgtctatattgggatcaccgccattgtgcgcttgatcatcgtcgatcataaatcgccactggatgtgttgatctactcggctgcgatcctgttactggtgatcaccctgtggctgtgtaattcgaaacggctgaagcgggagtaaaaagacagcacgccgaactggcgcggcgtgctggacaggaagattacagcgtagcagtttgttgtgttttcttcgtttccggttcccagagggcttccagctcctcaagggttttacctttggtttccgggacaaatttccacataaatagtgctgccagaacgcccatacacccgtaaatccagtaggagaaaccgttgtggaaatgggccaccagccaggagtttttgtccatcatcgggaaggtccaggagacgaagtagttcgccagccactgggccgccaccgcgattgccagcgctttaccacgaatagcattcgggaagatttccgacagcagtacccagcataccggaccccaggacatggcaaaggcggcaacatagaacagcatcgacagaagcgccacaatacccggtgcctgagtgtaaaacgcggtaccgaggctaaacataccgattgccattccgagtgcgccgataatttgcagtggcttacgaccaaatttatccaccgtcataattgccagaacggtgaaggtgaggttgataactccgacaataatggtctgcaacagcgcgatatccgtgctggcccccagcgttttgaacacttccggcgcgtagtacagcaccacattgatgccgacaaattgctggaggatggagagcataacgccgatgacaatcacgcctacgccaaacatcagcagacgaccaccggttttgcggccatgatccagagagtgtttaatttcctgtactgcctgagttgcaagggtgttgcccataattttgcgcaggataccttccgcctgttcttgcttgccgcgtgacatcagccagcgaggactttctggcacggtatacagcagcattaagaacagcagtgcagggatacattccgaggcaaacatataacgccagccgtcagtattcagccagctggcgtcgccggaacgggcaataaaatagtttacgcagtaaactaaaagctgcccgaaaataatcgcaaactggttaaaagagaccagtttcccgcgaatatgagcaggagcaagttccgcaatatacattggtgaaagcattgaggctaaaccaacgccaataccgccaataatgcgataaataacaaattccgggacataacctgccagataaacaggcactgtgttgtccgggtttatagaggtaaaaccaagttctggccaggcagaacctacaccagaaataaaaaacaggacagcagcaatcttaagtgaatcacgacgaccgaagcggctactgcaataaccaccgagggcaccgccgatgatgcaaccaatcagagcgctggccacgcaaaaccctaacagggagttggcagcggattcacttaagttttgtggagcaacaaagacggtattgagtgactcaacagtaccggaaataacggcggtgtcgtagccaaataataaaccacctaatgtagcgactaaggtaatcgaaaatatataactggaattatactgggtattcattcagacctgccttagaccattctgatcttttatcagtgcattgatgttggaattgtcaggcagttaaggcaattatcattttttacaatgcgtttacgtaatgtcttttctgtgatcttaattgtgataattatcaaaaattgatgaaaacaatactattgccgtgactcagagcacgaaagagaattatcgtaagtgggaaaacaaataacgtaaaaataataagttctatgatggaaatattaaccggcgaacgattcagattgcagacgaaagaaaaaaaggcgctccgtggagcgccgaataacagtcacaagttgggataacgtaagttgagggtgcagcggcataacattggcagaacaacatctttaacctttcacaccacctgccgtcaggccgttgaccagccagcgttgagccagcaagaagacgatggtgatcggtaatgcagacatcacggcagcggcggcaaagtcaccccacaggtagttttgcgggttgaggtattgctgcatccccacggccagggtgtagctgtttacgtcacgcagtaacagcgacgcgaccggaacttcagtaatggcagcgataaacgacaggatgaacaccaccgccagaatcggtactgacagcggcaacaggacaaggcggaaggcctgccacggtgtcgcaccatccagcgccgccgcttcttccagcgaactgtcgatggtttcgaaatagcctttgatggtccagacgtgcagcgcaatcccacccagatacgcgaaaattacgccgccgtgagtattcaggccaatgaatggaatgtactcacccagacgatcaaacaacgcatacaacgcgaccagtgaaagtactgccgggaacatctggaaaatcagcattcctttcagcagcgtcgctttgcctggaaagcgcatacgggcgaaagcgtaggcgcaggtggtggagagcgccacaatgccaatcgcggaaatcccggcgacctttaccgagttccacagccacagcagtaccgggaatggcggtggcgtaatgcgaccatcagcctgttccacgctaaaacctaatgccagtttccagtgatcccaggagatttgctccgggatcaggctaccggtcgcaaagttcccctggcgcagtgagatggcgacgaccatcagcagcgggaacataatcgccgcgataaaaagtagcagtagcaggtgagtaataaacaaacgtgctttttgcgatttcggttggaccattgccatttttgttatctcccttaatcaaacttcattcgcgtggctttcaggttcactatcgccagcgcacccaccagcaggaagatcagcgtggctattgctgctgccagaccgaagtcctgacccccgccgccttcaaaagcgatgcggtaggtgtagttaacaagcaggtcggtataaccggctggcgtggtcgtgccaagacgatccgggccgccgttggttaacagttgaatcagcacgaagttgttaaagttaaaggcgaagctggcgatcatcagcggcgtcagcggtttaatcagcagcggcagcgtaatcttaaagaagttctggaagggacctgcaccatccattgctgaggcttcatacaaatcgtccggaatcgctttcagcaagcccatgcagaggatcatcatgtacggataacccagccaggtattgacgataatcagcatcgttcgggcggtggtcggatcgctgaaccaggcgggcttcacgccaaacagcgcgctcaacatcatgttgatctcaccgaagctctggttaaacaaccctttgaaaatcaagattgaaatgaatgatggcaccgcgtagggcagaatcagcaggacgcgatagaccgctttgccgcgcaacgcttcccactgcaccagacacgccagaaccatgccgaccgccaccgttaaaaagacagtgatcagcgagaacaccacggtccagacgaaaatggcgaggaacggtttctgaatgccttcgtcggtgaagacgcgggtaaagtttttccagccagtagtcacggtgtaaccggggcttagcttttcatcgccccagttgccgtcggcggtaatggactggtaaaagccaatttggttattcggacgatatttcacgccgctctgattattcgtcaacgtgccgtcaccgtcgagtgtgtagagcggctgcgtgccagaaaactggcgcagggagctcatcatcactttgttgccatccggcagaatggcggtaatgtcactcagcgcctgacgattctgggtaatcacgcgcagatttgcgcgttcgccttcgggctgggcggtcgtttctttcagttgcagtttttgctcgccgccaaatttaaaagcgtcggagaggtaatttttgccggtttcgccgtcgctgagggctagttgccactcatcgcccgccgggtaaagaccaaaattataggttttgcctgcttgccaggagcgatctaacaacacttcctgcgcacgttcaaaagtcagctggttagtgctgctgtagttggtgaaggcaatggcgatggtgcagaccagagggaagaggacgaataatcccattccggccattcccgggtaaacatagcgccaggcgtaggctttacgattggcgaaaatatacagccccgctgaactcaatatcagcgtggtaatggcaaacaggtattccccttgtgcgtacattaaaacaacaaggtaacccaccagcaggccgagcagacctagcactgaccatttcagcgcgtcgctttgccaccaatg

SEQ ID NO: 263 - DNA, 16076 bp, Escherichia coli
  source 1..16076: mol_type = genomic DNA
ctgcccgacaacggcaaaaatcagcggttcatctcgcaggagatcggcagcttcaataacgttttccagcccctgcttttcaccaatattgccggagtaaagaatgatttttttgttatccggcaccccgggaatgcgcctgctggcgaaactctctggtgcgcgtaccgtgctgcatattcaggattacgaagtggacgccatgctggggctgggccttgccggaaaaggcaaaggcggcaaagttgcacagctggcaacggcgttcgaacgtagcggactgcataacgtcgataacgtctccacgatttcgcgctcgatgatgaataaagccatcgaaaaaggcgtggcggcggaaaacgtcatcttcttccccaactggtcggaaattgcccgttttcagcatattgcagatgccgatgttgatgcccttcgtaaccagcttggcctgccggataacaaaaaaatcattctttactccggcaatattggtgaaaagcaggggctggaaaacgttattgaagctgccgatctcctgcgcgatgaaccgctgatttttgccattgtcgggcagggcggcggcaaagcgcggctggaaaaaatggcgcagcagcgtggactgcgcaacatgcaatttttcccgctgcaatcgtatgacgctttacccgcactgctgaagatgggcgattgccatctggtggtgcaaaaacgcggcgcggcagatgccgtattgccgtcgaaactgaccaatattctggcggtaggcggtaacgcggtgattaccgcagaagcccacacagaactggggcagctttgcgaaacctttccgggcattgcggtttgcgtagaaccggaatcggtcgaggcgctggtggcggggattcgtcaggcgctcctgctgcccaaacacaacacggtggcacgtgaatatgccgaacgcacgctcgataaagagaacgtgttacgtcaatttataaatgatattcggggataattatggcgcagtcgaaactctatccagtcgtgatggcaggtggctccggtagccgcttatggccgctttcccgcgtactttaccccaagcagtttttatgcctgaaaggcgatctcaccatgctgcaaaccaccatctgccgcctgaacggcgtggagtgcgaaagcccggtggtgatttgcaatgagcagcaccgctttattgtcgcggaacagctgcgtcaactgaacaaactcaccgagaacattattctcgaaccggcagggcgtaacactgcacctgccattgcgctggcggcgctggcggcaaaacgtcatagcccggagagcgacccgttaatgctggtgctggcggcggatcatgtgattgccgatgaagacgcgttccgtgccgccgtgcgtaatgccatgccatatgccgaagcgggcaagctggtgaccttcggcattgtgccggatctacctgaaaccggttatggctatattcgtcgcggtgaagtgtcggcgggtgagcaggatacggtggcctttgaagtggcgcagtttgtcgaaaaaccgaatctggaaaccgctcaggcctatgtggcaagcggcgaatattactggaacagcggtatgttcctgttccgcgccggacgctatctcgaagaactgaaaaaatatcgcccggatattctcgacgcctgtgaaaaagcgatgagcgccgtcgatccggatctcgattttattcgcgtggatgaagaagcgtttctggcctgcccggaagagtcggtggattacgcggtcatggaacgtacggcagatgccgttgtggtaccgatggatgcgggctggagcgatgtcggttcctggtcttcattatgggagatcagcacccacaccgcggaaggcaacgtttgccacggcgatgtgattaatcacaaaaccgaaaacagctatgtgtacgccgaatctggcctggtcaccaccgtcggggtgaaagatctggtggtagtgcagaccaaagatgcagtgctgattgccgaccgtaacgcggtgcaggatgtgaaaaaagtggtcgagcagatcaaagccgatggtcgccatgagcatcgggtacatcgcgaagtctatcgcccgtggggcaaatatgactctatcgacgcgggcgaccgctaccaggtgaaacgcatcaccgtgaaaccgggcgaaggcttgtcggtacagatgcaccatcaccgcgcggaacactgggtggtggtcgcgggaacggcaaaagtcactatcgacggtgatatcaaactgcttggtgaaaacgagtccatttatattccgctgggggcgacgcattgcctggaaaacccggggaaaattccgctcgatttaattgaagtgcgctccggctcttatctcgaagaggatgatgtggtgcgcttcgcggatcgctacggacgggtgtaaacgtcgcatcaggcgctgtttgtcggatgcggcgtgaacgccttatccgacctacggttcggatttgtaggcctgataagacgcggcagcgtcgcatcaggcgctggctgtcggatgcggcgtgaacgccttatccgacctacggttcggttttgtaggcctgataagacgcggcagcgtcgcatcaggcaatgaatgcgaaaccgcggtgtaaataacgacaaatataaaattggccgtttcggtcagggccaactattgcctgaaaaagggtaacgacatgaaaaaattaacctgctttaaagcctatgatattcgtggaaaattaggcgaagaactgaatgaagatattgcctggcacattggtcgcgcttatggcgaatttctcaaaccgaaaaccattgtgttaggcggtgatgtccgcctcaccagcgaaaccttaaaactggcgctggcgaaaggtttacaggatgcgggcgtcgatgtgctggatattggcatgtccggcaccgaagagatctatttcgccacgttccatctcggtgtggatggcggcattgaagttaccgccagccataatccgatggattataacggcatgaagctggtgcgcgaaggggctcgcccgatcagcggtgataccggactgcgcgatgtccagcgtctggcagaagccaacgactttcctcccgttgatgaaaccaaacgcggtcgctatcagcaaatcaatctgcgtgacgcttacgttgatcacctgttcggttatatcaacgtcaaaaacctcacgccgctcaagctggtgatcaactccgggaacggcgcagcgggtccggtggtggacgctatcgaagcccgctttaacgccctcggcgctccggtggaattaatcaaagtgcacaacacgccggacggcaatttccccaacggtattcctaacccgctgctgccggaatgccgcgacgacacccgcaatgcggtcatcaaacacggcgcggatatgggcattgcctttgacggtgattttgatcgctgtttcctgtttgacgaaaaagggcagtttatcgagggctactacattgtcggcctgttggcagaagcattcctcgaaaaaaatcccggcgcgaagatcatccacgatccacgtctctcctggaacaccgttgatgtggtgactaccgcaggtggcaccccggtaatgtcgaaaaccggacacgcctttattaaagaacgtatgcgcaaggaagacgccatctacggtggcgaaatgagcgcccaccattacttccgtgatttcgcttactgcgacagcggcatgatcccgtggctgctggtcgccgaactggtgtgcctgaaagagaaaacgctgggcgaactggtacgcgaccggatggcggcgtttccggcaagcggtgagatcaacagcaaactggcgcaacccgttgaggcgattaaccgcgtcgaacagcattttagccgtgaggcgctggcggtggatcgcaccgatggcatcagcatgacctttgccgactggcgctttaacctgcgctcttccaacaccgaaccggtggtgcggttgaatgttgaatcgcgcggtgatgtgccgctgatggaagcgcgaacgcgaactctgctgacgttgctgaacgagtaatatcggatcttcccttaccccactgcgggtaaggggctaataacaggaacaacgatgacaaatctaaaaaagcgcgagcgagcgaaaaccaatgcatcgttaatctctatggtgcaacgcttttcagatatcaccatcatgtttgccggactatggctggtttgcgaagtcagcggactgtcattcctctacatgcacctgttggtggcgctgattacgctggtggtgttccagatgctgggcggcatcaccgatttttatcgctcatggcgcggtgttcgggcagcgacagaatttgccctgttgctacaaaactggaccttaagcgtgattttcagcgccggactggtggcgttcaataatgatttcgacacgcaactgaaaatctggctggcgtggtatgggctgaccagtatcggactggtggtttgccgttcatgtattcgcattggggcgggctggctgagtaagcatggctatagcaagcgcatggtggcggtagcgggagatttagccgccggacaaatgctgatggagagcttccgtaatcagccgtggttagggtttgaagtggtgggcgtttaccacgacccgaaaccgggtggcgtttctaacgactgggcgggcaatctgcaacagctggtcgaggatgcgaaagcgggcaagattcataacgtctatatcgcgatgcaaatgtgcgacggcgcacgagtgaaaaaactggtccatcaactggcggacaccacctgttcggtgctgctgatccccgacgtctttaccttcaacattctccattcacgcctcgaagagatgaacggcgtaccggtggtgccgctttacgacacgccgctttccggggttaaccgcctgctcaaacgtgcggaagacattgtgctggcgacgcttattctgctgctgatctccccggtgctgtgctgtattgcgctggcggtgaaactcagttcgccagggccggttattttccgccagactcgctatggcatggatggcaagccgatcaaagtgtggaagttccgttccatgaaagtgatggagaacgacaaagtggtgactcaggcgacgcagaacgatccgcgcgtcaccaaagtggggaactttctgcgccgcacctcgctggacgaattgccgcagtttatcaatgtgctgactggcgggatgtcgattgtcggtccgcgtccgcatgcggtggcgcataacgaacagtatcgacagctcattgaaggctacatgctgcgccataaggtgaaaccgggcattaccggctgggcgcagattaatggctggcgtggcgaaaccgacacgctggagaaaatggaaaaacgcgtcgagttcgaccttgagtacatccgcgaatggagcgtctggttcgatatcaaaatcgttttcctgacggtattcaagggcttcgttaacaaagcggcatattgatatgagcttacgtgaaaagaccatcagcggcgcgaagtggtcggcgattgccacggtgatcatcatcggcctcgggctggtgcagatgaccgtgctggcgcggattatcgacaaccaccagttcggtttgcttaccgtgtcgctggtgatcatcgcgctggcagatacgctttctgacttcggtatcgctaactcgattattcagcgaaaagaaatcagccacctggaactcaccacgctgtactggctgaacgtcgggctggggatcgtggtgtgtgtggcggtgtttttgttgagtgatgccattggtgacgtgctgaataacccggacctggcaccgttgattaaaacattgtcgctggcgtttgtggtgatcccccacgggcaacagttccgcgcgttgatgcaaaaggaactggagttcaacaaaatcggcatgatcgaaaccagcgcggtgctggcgggctttacttttacggtggttagcgcccatttctggccgctggcgatgaccgcgatcctcggttatctggtcaatagtgcggtaagaacgctgctgtttggctactttggccgcaaaatttatcgccccggtctgcacttctcgctggcgtcggtggcaccgaacttacgctttggtgcctggctgacggcggacagcatcatcaactatctcaacaccaacctttcaacgctggtgctggcgcgtattctcggcgcgggcgtggccgggggatacagcctggcgtacaacgtggccgttgtgccgccgatgaagctgaacccgatcatcacccgcgtgttgtttccggcattcgccaaaattcaggacgacaccgaaaagctgcgcgtcaacttctacaagctgctgtcggtggtggggattattaactttccagcgctgctggggctgatggtggtgtcgaataactttgtaccgctggtctttggtgagaagtggagcagcattattccggtgctgcaattgctgtgtgtggtggggctactgcgctccgtgggtaacccgattggttcgctgctgatggcgaaagcgcgggtcgatatcagctttaaattcaacgtattcaaaacatttctgtttattccggcgattgttattggtgggcagatggcgggcgcaatcggcgtcacgctcggtttcctgctggtgcagattatcaacaccattctgagttacttcgtgatgattaaaccggttcttggttccagttatcgccagtacatcctgagtttgtggctgccgttttatctctcgttgccgacgctggtggttagttatgcgctgggcattgtgctgaaagggcaactggcgctggggatgctgctggcggtgcaaatagccgcgggcgtgctggcgtttgtggtgatgattgtgctgtcgcgccatccgctggtggtggaagtgaagcgtcagttttgtcgcagcgaaaaaatgaaaatgcttttacgggcggggtgagttgctgttttcggttccgacaacggttgccggatgcggcgtaaaacgccttatccatcctacggttctgtgctcgggacctgtaggcctgataagacgcgtcagcgtcgcatcaggcactgaatgccggatgcggcgtgaacgccttatccggcctacggttctgtgctcgggtcttgtaggcctgataagacgcggccagcgtcgcatcaggcaaaaaacggcaatgaacacaacaaacacagcctcacctggcatcaaatttatgaggaaaaaatgaaattacttattctgggcaaccacacttgcggcaatcgtggcgacagcgccatcctgcgcggcttacttgatgccatcaacattctcaatccacacgccgaagtggatgtgatgagccgctatccggtcagttcttcctggctgctcaaccgcccggtaatgggcgatccgctgttcctgcaaatgaaacaacacaacagcgcagcgggcgttgtcgggcgcgttaaaaaagtcctccgtcgccgctaccagcatcaggtactgctctcgcgcgtcaccgacactggcaagttgcgtaatatcgccatcgcccagggattcactgacttcgtgcgcctgctgtcaggttacgacgccattattcaggtcggcggatcgttttttgtcgatctctacggcgtgccacagtttgaacatgcactttgcacgtttatggcgaaaaagccgctgtttatgattggtcacagcgttggcccgttccaggatgagcaatttaaccaactggcgaactatgtctttggtcactgtgacgcgctgatcctgcgcgaatcggtcagccttgatctgatgaaacgcagcaatatcaccaccgcaaaagtggaacatggcgtcgataccgcgtggctggtcgatcaccacacagaagacttcaccgccagctatgccgttcaacactggctggacgttgccgcacaacagaaaacggtggccattaccctgcgcgaactggcaccgttcgacaaacgtctcggcaccactcaacaagcgtatgaaaaagcctttgccggggtggtcaatcgcattctcgacgaaggctatcaggttattgcgctctccacctgtacgggcatcgacagctataacaaagacgaccgcatggtggcgctcaacctgcgtcagcacatcagcgatcctgcccgttaccacgtagtgatggatgaactcaacgatctggaaatgggcaaaattctcggagcctgtgaactcaccgtcggtacgcgcctgcactccgccattatctcaatgaactttgccactccggcgattgccatcaactatgaacataaatccgccgggattatgcagcagctggggctgccagagatggcgattgatatccgtcatttattagacggcagcctgcaagcgatggttgcggataccttaggccagcttccggcgctgaacgcacgacttaacgaagctgtcagtcgtgagcgtcagacgggaatgcagatggtgcagtctgtgcttgagcgcatcggggaggtgaaatgaaggtcggcttctttttactgaaatttccgttgtcgtcagaaaccttcgtcctcaatcaaattaccgcgtttattgatatgggatttgaggtggagattgtcgcgctgcaaaaaggcgacacacaaaacacccacgcggcatggacgaaatacaaccttgccgccagaacccgctggttacaggacgaacctacgggcaaagtggcgaaactgcgccaccgcgccagccagaccttacgcggcattcatcgtaaaaatacctggcaggcgctcaacctcaaacgctatggcgcagagtcgcggaacctgattttgtctgccatttgcggtcaggtcgcaacaccatttcatgccgatgtctttatcgctcattttggtccagcgggggtaaccgcagcaaaactacgcgaactgggtgtcattcgcggcaaaattgctactatcttccacggcattgatatctcaagtcgggaagtgctcaaccactacactcccgaatatcagcaactgttccggcgtggcgacctgatgctaccgataagcgatctgtgggccggaaggctgcaaaaaatgggctgcccgagggaaaaaatcgccgtatcgcgcatgggcgtggacatgacgcgctttagcccgcgtccggtgaaagcgcctgcaacgccgctggaaatcatttccgtcgcacgcttaaccgagaaaaaaggcctgcatgtggcgattgaagcctgtcggcagttgaaagagcagggcgtggcatttcgctatcgcatcctcggcattggcccgtgggaacgacgcctgcgcaccctcatcgaacaatatcaactggaagatgtgatagagatgccgggctttaaaccgagccacgaagtgaaagcgatgctcgacgacgcggatgtcttcctgttgccatcggtaacgggcgcggatggcgatatggaaggcattccggtagcgctgatggaagcgatggcggtcggcattccggtggtttctactctgcatagcggaataccggaactggtcgaggccgataaatccggctggctggtgcctgagaacgatgctcgcgcactggcgcaacgactggcggcgtttagccaactggacaccgacgaactggctccggttgtcaaacgagcgcgcgaaaaagtcgaacacgattttaaccagcaggtgattaatcgagaactcgccagtttgctgcaggctttatagaggagaacgtatgccatttaaaaaactctcccgacgcaccttcctgacggcaagctcggcccttgccttcctccatacccctttcgctcgcgcacttccagcccgacaaagcgttaacattaacgactacaatccacacgactggatcgcctcatttaaacaagccttcagcgaaggacaaacagtcgtcgtgcctgccggattggtttgtgacaatatcaacaccggcatcttcattcctgcaggtaaaacgttacacatccttggaagcctgcgcggcaacggcagagggcgatttgtcttacaggacggcagccaggtgacaggggaggagggcggcagtatgcataacatcaccctggatgtgcgcggctctgactgcaccatcaaagggctggcgatgagcggctttggcccggtaacgcagatttatattggtggcaaaaacaaacgggtcatgcgcaacctgatcatcgataacctcactgtcagccacgctaattacgccatcttacgccagggatttcataaccagattatcggtgccaacatcaccaactgtaagttcagtgatttacagggcgacgccattgaatggaacgtggcgattaacgacagtgatattttgatatctgaccatgtcatcgagcgcatcaactgtaccaacggcaaaatcaactggggcattggcataggccttgcgggaagcacttacgataataattacccggaagatcaggcagtgaaaaactttgtcgtggcgaatatcacgggatcggattgtcggcagttgatccatgttgaaaatggtaaacattttgttattcgtaatatcaaagcccgcaatatcacgccggatttcagtaagaaagcaggtattgataacgccacggtcgctatttacggttgtgataatttcgtgattgataatattgaaatgattaatagcgccgggatgttaatcggctatggggtaattaaaggcaaatatctctcgataccgcaaaatttccgagtgaataatattcaactggataatacccaccttgcttacaaattgcgcggtatccaaatctccgccgggaatgctgtctcctttgtggcgctgactaacattgagatgaagcgtgcgtcgctggagttacacaacaaaccgcaacatctttttatgcgtaatatcaatgtgatgcaggaatcctctgttggaccagcattgagcatgaacttcgacatgcgcaaagacgttcgcggcgtttttatggcaaagcgtgaaacgctgctttcactcacgaatattcatgccgtgaatgaaaaagggcaaagctccgtcgatatcgacaggattaatcaccatattgttaatgtggaaaaaattaactttagattgccagaacggagggagtagatttgcgaccattcctggaaaaatggagccatacttaggaacaatgctactgcaatccacaacgaagcggcgtaacatcacaagtaattcagtaatcaattcagggtaattgatgctggcgaaaaaaatcgaacaagctataattcagcaaccattttacaggtggatgaaataatgacgaatttaaaagcagttattcctgtagcgggtcttgggatgcatatgttgcctgccactaaggcgattcccaaagagatgctaccgatcgtcgacaagccaatgattcagtacattgttgacgagattgtggctgcagggatcaaagaaatcctcctggtaactcacgcgtccaagaacgcggtcgaaaaccacttcgacacctcttatgaattagaatctctccttgaacagcgcgtaaagcgtcaactgcttgcggaagtgcagtccatctgtccaccgggcgtgaccattatgaacgtgcgtcagggcgaacctttaggtttgggccactccattttatgtgcacgacccgccattggtgacaatccatttgtcgtggtgctgccggacgttgtgatcgacgacgccagcgccgacccgctgcgctacaaccttgctgccatgattgcacgattcaacgaaacgggtcgtagccaggtgctggcaaaacgtatgccgggtgacctctctgaatactcggtcatccagaccaaagaaccactggaccgtgaaggtaaagtcagctgcattgttgaatttatcgaaaaaccggatcagccgcagacgttggactcagacatcatggccgttggtcgctatgtgctttctgccgatatttggccggaacttgaacgcactcagccaggtgcatggggacgtattcagctgactgatgctattgctgaactggcaaaaaaacagtctgttgatgcaatgctgatgactggtgacagctacgactgcggtaaaaaaatgggctatatgcaggcgttcgtgaagtatggattacgcaacctcaaagaaggggcgaagttccgtaaaggcattgagaagctgttaagcgaataatgaaaatctgaccggatgtaacggttgataacaaaattataacggcagtgaagattcgtggcgaaagtaatttgttgcgaatactcctgccgttgttttatataaacaatcagaataacaacgagttagcaataggattttagtcaaagttttccaggattttccttgtttccagagcggattggtaagacaattagcgtttgaatttttcgggtttagcgcgagtgggtaacgctcgtcacatcgtaggcatgcatgcagtgctctggtagctgtaaagccaggggcggtagcgtgcattaatacctctattaatcaaactgagagccgcttatttcacagcatgctctgaagtaatatggaataaattaagtgaaaatacttgttactggtggagcaggatttattggttctgctgtagttcgtcacattataaataatactcaggatagtgttgttaatgtcgataaattaacgtacgccggaaacctggaatcacttgctgatgtttctgattctgaacgctatgtttttgaacatgcggatatttgcgatgcagctgcaatggcacggatttttgctctgcatcagccggatgcagtgatgcacctggctgctgaaagccatgtggatcgttcaattactggccctgcggcatttattgaaaccaatattgttggtacttatgtccttttagaggccgctcgtaattactggtctgctcttgatagcgacaagaaaaatagcttccgttttcatcatatttctactgacgaagtctatggtgatttgcctcatcctgacgaagtaaataataaagaagaattacccttattttctgagacaacagcttacgcgccaagtagcccatattctgcttcgaaagcatcaagcgatcatttagtccgcgcttggaaacgtacctatggtttaccgaccattgtgactaattgttcgaataactacggtccttatcactttccggaaaaattgattccactagtaattcttaatgctctggaaggtaaggcattacctatttatggcaaaggggatcaaattcgtgactggctgtatgttgaagatcatgcgcgtgcgttatataccgtcgtaatcgaaggtaaagcgggtgaaacttataacattggtggacacaacgaaaagaaaaacatcgatgtagtgctcactatttgtgatttgttggatgagattgtaccgaaagagaaatcttaccgcgagcaaattacttatgttgccgatcgcccgggacacgatcgccgttatgcgattgatgcagagaagattagccgcgaattgggctggaaaccgcaggaaacgtttgagagcgggattcggaagacagtggaatggtacctggctaatgcaaaatgggtcgagaatgtgaaaagtggtgcctatcaatcgtggattgaacagaactatgagggccgccagtaatgaatattctcctttttggcaaaacagggcaggtaggttgggaactacagcgtgctctggcacctctgggtaacttgattgctcttgatgttcactccactgattattgtggtgattttagtaatcctgaaggtgtggctgaaaccgtcaaaaaaattcgccctgatgtaattgttaatgctgcggctcataccgcagtagataaggctgagtcagaacccgaatttgcacaattactcaatgcgatcagcgttgaatcaattgccaaagcggctaatgaagttggggcttgggtaattcattactcaactgactacgtattccctggaaatggcgacattccatggttcgagactgatgtaaccgctccgctcaatgtttatggcaaaaccaaattggctggagaaagagcattacaagaacattgtgcaaagcaccttattttccggaccagctgggtctatgcaggaaaaggaaataacttcgccaaaacgatgttacgtctggcaaaagagcgtgaagaattagcggttattaacgatcagtttggtgcgccaacaggtgctgagctgctggctgattgtacagcacatgccattcgtgtagcactgaataaaccggaagtcgcaggcttgtatcatttggtagccagtggtaccacaacctggtacgattatgctgcgctggtttttgaagaagcgcgcaaagtaggcattccccttgcactcaacaagctcaacgcagtaccaacaactgcctatcctacaccagctcgtcgtccgcataactctcgccttaatacagaaaaatttcagcagaactttgcgcttgtcttgcctgactggcaggttggcgtgaaacgaatgctcaacgaattgtttacgactacagcaatttaatagtttttgcatcttgttcgtgatgatggagcaagatgaattaaaaggaatgatgaaatgaaaacgcgtaaaggtattattttagcgggcggttctggtactcgtctttatcctgtaactatggctgtcagtaaacagctgttaccgatttatgataaaccgatgatctattatccgctctctacactgatgttggcgggtattcgcgatgttctgattatcagtacgccacaggatacccctcgttttcaacaactgctgggtgatggtagccagtgggggttaaatcttcagtacaaagtgcaaccgagtccagatggtcttgctcaggcatttatcatcggtgaagagtttatcggtggtgatgattgtgctttggttcttggtgataatatcttttacggtcacgatctgccgaagttaatggatgccgctgttaacaaagaaagtggtgcaacggtatttgcctatcacgttaatgatcctgaacgctacggtgtcgttgagtttgataaaaacggtacggcaataagcctggaagaaaaaccgttacaaccaaaaagtaattatgcggtaaccgggctttatttctatgataacgacgttgtcgaaatggcgaaaaaccttaagccttctgcccgtggtgaactagaaattaccgatattaaccgtatttatatggaacaggggcgtttatctgttgccatgatggggcgtggttatgcatggcttgacacggggacacatcaaagtcttattgaagcaagcaactttattgcaacaattgaagaacgtcaggggctgaaagtatcctgcccggaagaaattgcttaccgtaaagggtttattgatgctgagcaagtgaaagtattagctgaaccgctgaaaaaaaatgcttatggtcagtatctgctgaaaatgatcaaaggttagtaataaaatgaacgtaattaaaacagaaattccagacgtactgatttttgaaccgaaagtatttggtgatgagcgtggtttcttttttgagagctttaatcagaagatttttgaggaagctgtaggccgcaaagttgaatttgttcaggataaccattcgaagtctggtaaaggtgttttacgcgggctgcattatcagttagaaccttatgcgcaagggaaattggtacgttgtgttgttggtgaggtttttgatgttgcggttgatattcgtaaatcgtcacctacctatggaaaatgggttggggtgaatttatctgctgagaataagcgccagttgtggatacctgaaggatttgcgcatggatttttggtgctgagtgagacggctgagtttgtttataaggcgacgaattattatcatcctgagagtgatagggggattatatggaatgatccagcactttctatcaaatggccaaactacaagtttttaattttgtcacaaaaggataagaacaacaaa

SEQ ID NO: 264 - DNA, 15946 bp, Escherichia coli
  source 1..15946: mol_type = genomic DNA
gcggtgcacttcgtgacaacaagttaatgactaacacaccggcacaaatcaacatcatgcctatgatagctggcaggtccagtcgttgaccaaaaaatccccaggaaagcaaactaatcagaacgataccgacgcctgaccagatagcataagcaatccctgtaggtatataagccagcgtctgagctaataaccagaatgatgcacaatagcaaataattgtgccaacagagggccataaccgtgtaaacccctctgaaaacttcattaaggttgtaccaatgacctctgcaagtattgcgccaccaagataaatataagggttcatagcatattctttcctgttcatactggagagaattgtactacagtttgaacacaactcaccgttttcatcctggtgtatgtgtatccagggggctctggcgtggcaagagataaaggcaggaacaataatgatcagaaggaaccccaggctaacgaatgagttcactcttcctgggagcaaagcgaagacaaaacatgttatcgcgtttacggatcgtggatggcagaaaactttcaggatcaggtatccattttaaaccagaaattgagtgagtttgccccatccatgccccacgctgtgggatcggatataataaacaagcatagtcaacaggttacaaaacctacacctgcatggacatcacttcctgatacgccgccaccagcttattacgcacctgaatccccatttgcatagaaactgaggctttttgcatatcggtcatcacatcgtttagcgccacgccgggctcaccgagggtgaatttttctgcctgcgtgcgggcggctgtttgtgtatcgcttatgcgatcgagcgcggcgtgcagctgcccggcaaaactaattgtcggttgcggcagtgattcctgcgcacgcgcactcatcgccgtggtctgtaactggctgataaccccttcaatcccctgtatcgctgacattttcatctcccggataatttctggtagcaaagcctaccagtaagtcaataagacaaaggcgctaaatagcaacaaaaaaacgggtttattggcggatagaaaaaaacgaaagcacaaataatgggagcgtcaatttttcgagtttgctgacccgggagtgagtcttgttccactttgccaataacgccgtccataatcagccacgaggtgcgcgatgaatgcggctgcagcccagacaaaatctcttgagtggcttaatcgcctgcgtgcgaatccgaaaattccattgattgttaccggttccgcggcagtggcggtcatggtcgcactgatcctgtgggcgaaaacccccgactaccgtacattattcagcaatctttccgatcaggatggtggcgcaattgtcagccaactgacgcaaatgaatattccttaccgcttcagcgaagccagcggcgctattgaggttccggcagataaagttcacgaactgcgcctgcgcctggcgcaacaaggtttgcccaaaggcggcgcggtcggtttcgaactgctcgatcaggaaaagtttggtatcagccagttcagcgaacaggtgaattatcagcgggcgctggaaggcgagctttctcgtaccatcgaaactataggcccggtaaaaggggcgcgcgtacatctggcaatgccgaaaccgtctttattcgtccgtgaacaaaaatccccttctgcatcggtgacggtaaatctgttacccggccgcgcactcgatgaagggcaaattagcgctattgtacatctggtttccagcgcggttgctggtctgccgccaggaaacgtcacgctggtggatcagggcgggcatctgttaacccagtccaataccagcgggcgcgatcttaatgacgctcagttgaaatatgccagcgatgtcgaaggccgtattcagcggcgtattgaagcgatcctgtcgcctattgttggtaacggtaatattcacgcccaggtcacggcgcaactggacttcgccagtaaagaacaaacggaagaacagtatcgccctaacggtgatgaatctcatgcggcgcttcgttcacgccagcttaatgagagcgagcaaagcggttccggttatccgggcggcgtaccgggggcgttgtcgaatcaaccggcacctgcgaataacgcaccaatcagcacgcctccggcaaatcaaaataaccgccagcagcaggcgagcaccaccagcaatagtgggccgcgtagcacacagcggaatgaaaccagtaactacgaagtcgatcgcaccattcgtcataccaaaatgaacgtgggcgatgtgcaacgtctgtcagtcgcggttgtggtgaattacaaaaccttgccagacggtaaaccattgcctctcagcaacgaacagatgaagcaaattgaagctctgacccgcgaggcgatgggcttttctgaaaaacgcggtgattcgctcaatgttgttaactcgccgttcaatagcagtgacgaaaacggcggagcactgccgttctggcaacagcaagcgtttatcgatcagttgctggctgccggtcgctggttgctggtactgctggtggcgtggttgctgtggcggaaagcggtacgcccgcagctaacacgtcgcgccgaggcggtgaagactgtgcagcaacaggcgctgacccgcgaggaagtggaagatgcggtggaagtccgtctgagcaaagacgaacaactccaacaacggcgcgctaaccaacgtctgggggcagaagtcatgagccagcgtatccgtgaaatgtctgataacgatccgcgcgtggtggcgctggtcattcgccagtggataaataacgatcatgagtaacctgacaggcaccgataaaagcgtcatcctgctgatgaccattggcgaagaccgggcggcagaggtgttcaagcacctctcccagcgcgaagtgcaaacccttagcgctgcaatggcgaacgtcacgcagatctccaacaagcagctaaccgatgtgctggcggagtttgagcaagaagctgaacagtttgccgcactgaatatcaacgccaacgattatctgcgttcggtattggtcaaagctctgggtgaagaacgtgccgccagcctgctggaagatattctcgaaacccgcgataccgccagcggtattgaaacgctcaactttatggagccgcagagcgccgccgatctgattcgcgatgagcatccgcaaattatcgccaccattctggtgcatctgaagcgcgcccaggccgccgatattctggcgttgttcgatgaacgtctgcgccacgacgtgatgttgcgtatcgccacctttggcggcgtgcagccagccgcgctggcggaactgaccgaagtactgaatggcttgctcaacggtcagaatctcaagcgcagcaaaatgggcggcgtgagaacggcagccgaaattatcaacctgatgaaaacgcagcaggaagaagccgttattaccgccgtacgtgaattcgacggcgagctggcgcagaaaatcatcgacgagatgttcctattcgagaatctggtggatgtcgatgatcgcagcattcagcgtctgttgcaggaagtggattccgaatcgctgctgatcgcgctgaaaggggccgagcagccactgcgcgagaaattcctgcgcaatatgtcgcagcgtgccgccgatattctgcgcgacgatctcgccaaccgtggtccggtgcgtctgtcgcaggtcgaaaacgaacagaaagcgattctgctgattgtgcgccgccttgccgaaactggcgagatggtaattggcagcggcgaggatacctatgtctgataatctgccgtggaaaacctggacgccggacgatctcgcgccaccacaggcagagtttgtgcccatggtcgagccggaagaaaccatcattgaagaggccgaacccagccttgagcagcaactggcgcaactgcaaatgcaggcccatgagcaaggttatcaggcggggattgccgaaggtcgccagcaaggtcatgagcagggctatcaggaaggactggcccgggggctggagcaaggtctggcagaggcgaagtctcaacaagcgccaattcatgcccggatgcagcaactggtcagcgaatttcaaactacccttgatgcgcttgatagtgtgattgcttcgcgcctgatgcagatggcgctggaggcggcacgtcaggtgatcggtcagacgccaacagtggataactcggcactgatcaaacagatccaacagttgttgcagcaagaaccgttattcagcggtaaaccacagctgcgcgtgcacccggatgatctgcaacgtgtggatgatatgctcggcgcaaccttaagtttgcatggctggcgcttgcggggcgatcccacactccatcctggcggctgtaaagtctccgccgatgaaggcgatctcgacgccagtgtcgccactcgctggcaagaactctgccgtctggcagcaccaggagtggtgtaatgaccacgcgcctgactcgctggctaaccacgctggataactttgaagccaaaatggcgcagttgcctgcggtacgtcgctatgggcgattaacccgcgctaccgggctggtgctggaagccaccggattacaattgccgctcggcgcaacctgtgtcattgaacgccagaacggcagcgaaacgcacgaagtagaaagcgaagtcgttggctttaacggtcaacggctgtttttaatgccgctggaggaagtggaaggtgtcctgcccggcgcgcgggtttatgccaaaaacatttcggctgaaggactgcaaagcggcaagcagttgccgctcggtccggcgttattaggtcgcgttctggacggcagcggtaagccgctcgatggcctgccctcccccgatacgacggaaaccggtgcgctgattaccccgccatttaacccgttgcaacgtacaccgattgaacatgtgctggacaccggcgtgcgcccaatcaatgccctgcttaccgttgggcgcgggcagcgtatggggctgtttgccgggtccggcgttggtaaaagtgtgctgctggggatgatggcacgttacacccgcgccgatgtcattgtcgtgggtttgattggtgaacgtgggcgcgaagtaaaagattttattgagaatatcctcggtgccgaagggcgtgcacgctccgtggtgattgccgctccggcggatgtctctccgcttctgcgaatgcaaggtgccgcctatgccacgcgcattgccgaagattttcgcgatcgtggtcagcatgtgttgctgattatggactccctcacccgctacgcgatggcccagcgtgaaattgcgctggcgattggcgaaccacccgccaccaaaggttatcccccgtcggtgtttgccaaattaccggcactggtcgagcgtgccggaaatggcattagcggcggcggatcgattaccgcgttttataccgtgctcaccgagggcgatgaccagcaggaccccattgccgactccgcgcgggcaatcctcgacggtcacattgtgctgtctcgccgactggcggaagccgggcactatccggctatcgatattgaagcgtcgatcagccgcgcaatgacggcgttgatcagcgagcaacattacgcgcgagtgcgcaccttcaaacagctgttgtcgagttttcagcgtaaccgagatctggttagcgtcggcgcgtatgccaaaggcagcgatccgatgctcgataaagccatcgccctgtggccgcagctggagggctatttgcaacaaggcatttttgaacgcgcggactgggaagcgtctctccaggggctggagcgtattttcccgacagtgtcataacccaggagataacggcagatggcagaacatggtgcgctggcgaccctgaaagatctggcagaaaaagaggtagaggatgccgcgcgcctgctgggtgaaatgcgtcgcggatgtcagcaggcggaagaacagctcaaaatgctgatcgattatcagaatgaatatcgcaataacctcaatagcgatatgagtgccgggatgaccagcaaccgctggatcaactatcagcagtttatccagacgttggaaaaagccattactcagcatcgccagcaacttaatcagtggacgcagaaagttgacattgccctgaacagctggcgagaaaagaaacaacgtttgcaggcctggcagacactgcaggaacggcaatccacggcggcactgcttgcagaaaaccgcctcgatcagaaaaagatggatgagttcgcccagcgcgccgccatgaggaaacctgaatgattcgcttagcgcccttgattaccgccgacgttgacaccaccacattgcctggcggcaaagccagcgatgctgcacaagattttctcgcgttgttgagcgaagcattagcaggcgagacaactaccgacaaagcggccccccagttgctggtggcaacagataagcccacgacaaaaggcgagccgctggtcagcgagattcttgccgatgcgcaacaagcggatttactgatccctgtggatgaaacaccgcctgtcatcaacgacgaacaatccacatcaacaccattaaccaccgctcaaacgatgacgttggctgcggtggctggcaacaatacggcaaaagacgaaaaagcggatgatctgaatgaagacgtcaccgcaagcctgagcgccctttttgcgatgttgccgggttttgacaatacgcccaaagtgactgatgtgccgtcaaccgtgttaccggcagagaaaccaacgctcttcacaaaactgacttctgcgcaactcacaacagcacagcctgatgatgcccccggcacgccagctcagccattaacaccgctggtagcagaagcccagagtaaagcggaagtcatcagcacaccctcaccggtgaccgctgccgccagccccctaatcactccacaccagacacagccactgcccaccgtcgccgcgcctgtgttgagtgcaccgctgggttctcacgaatggcaacaatcattaagccagcatatttcgctgttcacccgccaggggcaacaaagtgcagagttgcgtctgcacccgcaggatttaggtgaagtgcaaatctccctcaaagtggatgataaccaggcgcaaatccagatggtttcaccgcatcaacacgtacgcgccgccctggaagcagcgcttccggtactgcgaacgcagctggccgaaagtggcattcagttagggcaaagcaacatcagtggcgaaagctttagtggtcagcagcaggccgcttcccagcaacagcaaagccaacgcacagcaaaccatgaacctctggcgggggaagacgacgatacgcttccggttcccgtctctttacaagtacgtgtaacaggcaacagcggcgttgatattttcgcctaacgtcagaggtagcaccgtaatccgcgtcttttccccgctttgttgcgctcaagacgcaggataattagccgataagcagtagcgacacaggaagaccgcaacacatgactgattacgcgataagcaagaaaagcaagcgatcgctttggatcccgattctggtattcattaccctcgcggcctgtgccagcgcaggttacagctactggcattcgcatcaggttgccgctgacgaaaaagcgcagcaacgcgtcgtgccctccccggtcttctatgcgctggatacctttacggtcaatctgggcgatgcagatcgcgtactttatatcggcataaccctgcgcctgaaagatgaagctacccgctcgcggctgagtgagtatttgccggaagtccgtagccgtttgctgttactgttttcgcgtcaggatgctgccgtactggcgacagaagaaggcaagaaaaacctgattgccgagattaaaaccacgctttccaccccgcttgttgccgggcaaccgaaacaggatgtcaccgacgtgctgtataccgcttttattctgcgataacgacatgggcgatagtattctttctcaagctgaaattgatgcgctgttgaatggtgacagcgaagtcaaagacgaaccgacagccagtgttagcggcgaaagtgacattcgtccgtacgatccgaatacccaacgacgggttgtgcgcgaacgtttgcaggcgctggaaatcattaatgagcgctttgcccgccattttcgtatggggctgttcaacctgctgcgtcgtagcccggatataaccgtcggggccatccgcattcagccgtaccatgaatttgcccgcaacctgccggtgccgaccaacctgaaccttatccatctgaaaccgctgcgcggcacagggctggtggtgttttcaccgagtctggtgtttatcgccgtggataacctgtttggcggcgatggacgcttcccgaccaaagtggaaggtcgcgagtttacccataccgaacagcgcgtcatcaaccgcatgttaaagctggcgcttgaaggctatagcgacgcctggaaggcgattaatccgctggaagttgagtacgtgcgttcggaaatgcaggtgaaatttaccaatatcaccacctcgccgaacgacattgtggttaacacgccgttccatgtggagattggcaacctgaccggcgaatttaatatctgcctgccattcagcatgatcgagccgctacgggaattgttggttaacccgccgctggaaaactcgcgtaatgaagatcagaactggcgcgataacctggtgcgccaggtgcagcattcacagctggagttggtcgccaactttgccgatatctcgctacgcctgtcgcagattttaaaactgaaacccggcgacgtcctgccgatagaaaaacccgaccgcatcatcgcccatgttgacggcgtcccggtgctgaccagtcagtacggcactctcaacggtcagtatgcgttacggatagaacatttgattaacccgattttaaattctctgaacgaggaacagcccaaatgagtgacatgaataatccggccgatgacaacaacggcgcaatggacgatctgtgggctgaagcgttgagcgaacaaaaatcaaccagtagcaaaagcgctgccgacgcggtgttccagcaatttggcggtggtgatgtcagcggaacgttgcaggatatcgacctgattatggatattccggtcaagctgaccgtcgaactgggccgtacgcggatgaccatcaaagagctgttgcgtctgacgcaagggtccgtcgtggcgctggacggtctggcgggcgaaccactggatattctgatcaacggttatttaatcgcccagggcgaagtggtggtcgttgccgataaatatggcgtgcggatcaccgatatcattactccgtctgagcgaatgcgtcgcctgagccgttagtgatgaataaccacgctactgtgcaatcttccgcgccagtttctgctgcgccactgctgcaggtgagcggcgcactcatcaccattattgccctgatcctcgctgctgcctggctgataaaacggctgggatttgcccctaaacgcactggcgttaacggtctgaaaattagcgccagtgcttcgctgggcgcgcgtgaacgggttgtggtggtcgatgtggaagatgcacggctggtgctcggcgttaccgcagggcaaatcaatctgctgcataaacttcccccttcagcaccaacagaagagataccgcagaccgattttcagtcggtcatgaaaaatttgcttaagcgtagcgggagatcctgatgcgtcgtttattgtctgtcgcacctgtccttctctggctgattacgcccctcgccttcgcgcaactgccgggtatcaccagccagccgctgcctggcggtggacaaagctggtcgctcccggtgcagacgctggtgttcatcacctcgttgacgtttattccggcaattttactgatgatgaccagtttcacccgcatcatcattgtttttggtttattgcgtaacgcgctgggaacaccctccgcgccacctaaccaggtattgctggggctggcactgtttttgaccttttttattatgtcaccggtgatcgacaaaatttatgtcgatgcgtaccagccatttagcgaagagaaaatctcaatgcaggaggcgctggaaaaaggggcgcagccgctgcgtgagtttatgctgcgtcagacccgcgaggcggatttagggttgtttgccagactggcgaataccggcccgttgcagggacctgaagccgtgccgatgcgcattttgctcccggcctacgtgaccagcgagttgaaaaccgcatttcagataggcttcacgattttcattccttttttgattatcgacctggtgattgccagcgtgttgatggcattggggatgatgatggttcccccagccaccattgctctgccctttaaactgatgctgtttgtactggtggatggttggcaattgctggtcggttcgctggcgcagagcttttacagctagagaggcaaaatgacacctgaatcggtcatgatgatggggactgaagcgatgaaagtcgcgctggcactggctgccccgctgttgctggtggcgctggtcacgggtcttatcatcagtattttgcaggccgccacccagattaacgaaatgacgctgtcgtttattccgaaaatcatcgccgtatttatcgccattattattgccggaccgtggatgctcaatctgttgctggattacgtccgcaccttgttcactaacctgccgtatatcatcgggtaggccgtacaatgatgcaggtgacaagcgatcaatggctttcctggttaagcctgtacttctggccgttactgcgcgtgctggcgctcatttctaccgcaccaattctgagcgaacgcagcgtgccgaaacgggtaaaactggggctggcaatgatgatcacgttcgccattgccccatcattacctgccaacgatgttcctgttttttcgttctttgctctgtggctggccgtgcagcagatcctgatcggcattgcgcttggttttaccatgcaatttgcctttgccgctgtgcgaaccgctggcgaaattatcggtctgcaaatggggctgtcatttgcgacgtttgtcgatccggccagccatctcaatatgcccgttttagcgcgtatcatggatatgctggcgttactgctgttcctgacatttaacggtcatttatggttgatttcactgctggtcgatacctttcacaccctgcctattggtggcgaaccgttgaacagcaatgcgtttctggcactcaccaaagcagggagtttgattttccttaacgggctgatgctggcgttaccgctcattactctgctgctgaccctgaatctggcattaggtttactgaatcgtatggccccgcaattatccatttttgttattggatttccattaactctgactgtcggtatctctttaatggcggcattaatgccgttaattgcgcctttttgcgaacatttattcagtgaaatttttaatttgctggctgatattattagtgaattgccattaatataattccgtaacgtttatcatgttatcctaaggattatccgaaaaataatacctacgaacatcttccaagatactcctgcagcgaaatatttgttttaagctcactcacatatcgcaacatttactttactttaagacaattccaggcaaattatacaacactttacgggatagtaagtccgcctgaaaaatcgcgagagtggcgcattaggtgacccatgttgttccgtttagtcatgatgaaatattcaggtaaggggaattatcgttacgcattgagtgagggtatgccatgtcaacgattattatggatttatgtagttacacccgactaggtttaaccgggtatctgttgagtagaggggttaaaaaaagagaaatcaacgacattgaaaccgttgatgaccttgccatagcttgtgattcacagcgcccttcagtggtgtttattaatgaggactgtttcatccatgatgcttctaacagtcagcacatcaagcacatcattaatcaacatcccaatacgttatttatcgtttttatggcaattgccaatgttcattttgatgaatatctattggtcagaaaaaatttattgataagttctaaatcgattaaaccggaatctctcgacgatatccttggcgatattctgaaaaaagagacaacgataacctcgtttttaaatatgccgacgttatcattgagccgaaccgaatcgagtatgttgcgaatgtggatggcaggtcagggaaccattcaaatctctgaccaaatgaatatcaaagccaagaccgtttcatcgcataaaggtaatattaaacgtaagatcaaaacgcataataaacaggttatctaccatgtcgtccgactgacggataatgtgactaatggtatttttgtcaacatgcgctaacacattctgactggtggtttcccaccagtcaggctgaataagattactctgctttctccacaaagataccgtcctgatgccctgcttcattaaaaaaccagatgccgagcgggtagtcttccagcgaaaccaggtacattgtgccttcactaaactcctcaactgccagtaccacgccaggacgacgcggaccgccatccgttttgactgttacccgatcattcaccttcatcgttttcctcctgtgcctttgtgccagtgtagaacaatttcgtttttctggcagcgccaggcgcgcgcgagtgctgattttctcgacggtctatacttaagtgatgccaggcggacttaacgactggcggcaacaacagagtaacggttgcgaggaaagatgatgaaaaccgcaaaagagtacagcgataccgcaaaacgtgaggtcagcgtcgatgtcgatgccctgctggcggcgatcaatgaaattagcgaaagcgaagttcatcgcagccagaacgattctgaacacgttagcgtcgatggacgtgaatatcatacatggcgtgaattggcggatgccttcgaactggatattcatgacttcagcgtctctgaagtgaatcgttgaatgcacaataaaaaaatcccgaccctgagggggtcgggatgaaacttgcttaagcaagaagcacttaaaaaattcgttacaccaggaaatctgatgtgttcatcaccttatccgcaatttttttcgctgacaagaaaatattcgctatatgaatgattaacgctacttatgaatagaaatgtgacgcacgtcaccccttggtggctctggcgtcagcgggatcgctcccgaacaaaatcatctttgataatttgtgctgttttgagaatcatcctggtaaggggagtactgcgcgactatgttttcaattcaacaaccactactggtttttagcgatcttgatggcaccctgctggacagtcatagttatgactggcaaccggcagccccctggctcacccgtttacgcgaagcaaatgttcccgtcattctctgtagcagtaaaacatcagcggaaatgctgtacttgcaaaaaacgttggggctacaaggtttaccgctgattgccgaaaatggcgcagtgatccagcttgctgagcaatggcaggagatagacggttttccacgcatcatctcaggtattagccatggcgaaatcagccaggttttaaatacgctacgcgagaaagaacattttaaattcacgacttttgatgatgtcgacgatgcaactatcgccgaatggacgggattaagccgtagccaggcggcgctgacgcagcttcatgaggcgtcggtaacgctaatctggcgcgacagtgacgagcgtatggcacaatttaccgctcgtctgaacgaactgggcttacagtttatgcaaggtgcgcgcttctggcacgtcctggatgcctctgccggaaaagatcaggttgccaactggattatcgcgacctatcaacaattgtcaggcaaacgcccaaccacacttggcctgggcgatgggccaaacgatgcgcccttactggaggtaatggattacgcggtgattgtgaaagggctaaaccgtgaaggggtgcatctgcatgatgaggatccggcccgcgtctggcgaacgcagcgtgaaggaccggaaggatggcgtgaagggctggaccattttttctccgcccgttaagcgttatcgctcgcgaatacccgattacgcccagcctgtttagcgagataaagccgacggtcggccagtgactggaattgttcaaaatcataatcaccggtttcctcgctgctacttacccccaacgaggcactgatgcgtatcgtcgtactcttagcaatcaacatctctttttcatttaacttcaggcgaatacgttctgcgacttccgcagcctccgtcagactcgcgcctggcagaatcacacaaaactcctcaccaccgacccgcccggcaacgtcctgcgcacgcaaggaactgctaattaatccggcagcatgagaaagaacacggtcgcccgcctgatgaccaaagcggtcattaatcgctttaaaatggtcaagatcgacctgaatgacagaaaaaggatgttggtgcgtctgacacaatttagcgagcggacgggctttttcgaacagtgcgccacgattatataaacgggttaaggtgtcgtgccacgcctgccactgcaacgaactttgcagaacatacatgttgctgaccatccggcgaatcacataccaggagatgagtaacatggtggtaaagagcgcccacagcagggttaatgcaatgctgatactgccgaaatcgccgcgcacgccttcgcttaacgtatggacgcgcaccagcacaccgtcgaaatggtccagacgttcccagctaacatagcgactgtccatacgaatgccgccccgcgtgtcatgttccattgcctacgccagcaaggccagttcacgaggatcaaaaatattccctgttggatggtcaggattggaagaggtcaaaaatctcagcttactgtcatagagctgatactcaccatcgaggtttttatcgatggcgtttcttaaaaattgctgcatagtacgcacgggaatactcatccccagcacgccataccagtagttattactgtctaccggaacactgacggtaacctgcggttcagtattgctggcgtgttccggttgcgaagtgaaccagcgtaccgcgcggtgacgattttctcgttgtgaatggccaataaaccagggttgggtgacatagccgtaataacgcgttggaacattgcgcgtaaacaaggtcggctgcgtcgaaacgtaaaatccggcacgcgagacatacatcgcctgttcaaccatcgacgaggagttgtgcgctagtcgcagcaagtaaccaacttccagtgcagcggtaatttcattgtcgaggctttcattttcgcgagacaggagattcccctcgctgactaatgcatccgacacgccattgactggcagggtgcgccgtcggttgagttcgattttccaggcgtgctcgtcgcgatgctgttcgaactcggttacagcatcacgcagagaggtgaaatccagtggcgctatgagagcttcgcgcatgccattacgcaaaaagatcagtttgtcgacgttatactgcaaatgcttatcgagcgcgttggctacgttttccagatgattacgctggctggagatataggcatcttccagcaccactacttcacgccaggtgagcaaggtggaaaaaagcaataccactataaagcagagattaacgatatgaccaggccccaggcggcgtgcgag

SEQ ID NO: 265 - DNA, 15888 bp, Escherichia coli
  source 1..15888: mol_type = genomic DNA
ggatacaccaacctccggcgatgtgatctttaacggtcaaccgatgagcaaactgtcttcggcggcgaaagcagaactgcgcaaccagaagctgggctttatttatcagtttcaccacctgctgccggattttactgccctggaaaacgtggctatgccactgctgattggcaagaaaaagcccgctgaaatcaacagccgtgcgctggagatgttaaaagcggtggggctggagcatcgtgcgaatcaccgcccatctgaactttctggcggcgaacgccagcgtgtggcgattgcccgtgcgctggtcaataatccgcgtctggtacttgcggatgagcctaccggtaacctcgatgcgcgtaacgccgacagcatcttccagttgcttggggaattgaatcgcttgcagggcaccgccttcctggtggttactcacgacctgcaactggcgaaacgtatgagccgccaattggaaatgcgtgatggacgtctgacggcggaactgagcctgatgggggcggagtaatggcgatgcctttatcgttattgattggcctgcgttttagtcgcggacggcggcgcggcggcatggtgtcgctgatctccgttatttctaccattggcattgccctcggcgtggcggtattgatcgtcggcttaagcgcgatgaacggctttgaacgcgaactgaataaccgtattctggcggtggtgccgcatggtgaaattgaggcggtaaatcagccatggactaactggcaggaagcactggataacgtgcaaaaagtgccgggtattgccgctgctgcgccgtatatcaatttcaccggactggtagaaagtggtgccaatctgcgcgcaattcaggtgaagggcgttaacccgcaacaggaacagcgtctgagcgcattaccctcgtttgttcagggggatgcctggcgcaattttaaagcgggcgaacagcaaattatcatcggcaaaggcgtggcggatgcgctgaaagtgaagcagggcgattgggtgtcgatcatgatccccaactcgaatcccgagcataaactgatgcagccaaaacgtgtgcgtttgcacattgccggtattttgcagttgagtggtcaactcgatcacagttttgccatgatcccgctggcggatgcccaacaatatcttgatatgggttccagcgtgtcaggtattgcccttaaaatgacggatgttttcaacgccaataagctggtacgcgatgcgggtgaagtgaccaacagctatgtttatattaaaagttggattggtacttacggctatatgtatcgcgatatccagatgatccgcgccattatgtatctggcgatggtactggtgattggcgtggcctgtttcaacatcgtctccaccttagtgatggcggtgaaagacaagagtggcgatatcgcagtattaagaacgctgggggcgaaagatggtttaattcgcgccatctttgtctggtatggattgctggcagggctgttcggcagcctgtgtggggtgattatcggtgtggtggtttcactgcaacttaccccgattattgagtggattgaaaagttgatcggtcatcagttcctctccagcgatatctattttattgatttcctgccatcggaattgcactggctggacgtcttctacgtactggtcacagcattgttgctgagtcttttggcaagttggtatccggcgcggcgcgccagtaatattgaccctgcgcgagtccttagcggccagtaaaggcagtacattaaaacaaggagcggcaatgtattacgggtttgatattggtggaacaaaaattgcgcttggcgtgtttgatagcggtcggcagttgcagtgggaaaagcgggtgccgacaccgcgtgacagctatgacgcatttttagatgcagtgtgtgagctggtagctgaagctgaccaacgttttggctgtaaaggttctgtcggcatcggtattccgggaatgccggaaacagaagatggtacgctgtatgccgccaatgtccccgctgccagcggtaaaccgctgcgtgccgacctgagcgcacgtcttgatcgcgatgtacgccttgataacgatgccaactgttttgccctttcagaagcctgggatgatgaatttactcaatatccactggtgatggggttgattctcggcaccggcgttggcggcgggctgattttcaacggcaaaccgattaccggtaaaagctacattaccggcgagtttggccatatgcgtctgccggttgatgcgttaaccatgatggggttggatttcccgttacgccgctgcggctgtggtcagcatggctgcattgaaaattatctgtctggtcgcggttttgcgtggctgtatcaacactattatcatcaaccgttgcaggctcccgaaattattgcgctttatgatcaaggcgatgagcaggcaagggcgcacgttgagcgttatctggatttattagcggtttgtctgggaaatatcctgaccattgttgaccctgacctggtcgtcattggtggtggcttatcgaatttcccggcaatcacaacgcaactggcggacaggctgcctcgtcatctcttacctgtagctcgtgttccgcgcattgaacgcgcgcgccacggtgatgcgggaggaatgcgtggtgcggccttcctacatctaaccgattaaacaacagaggttgctatgctgtcgcgtcggggtcatcggttaagtcgttttcgtaaaaataaacgccgcctgcgcgagcgtttgcgtcagcgtatttttttcagagataaagtggtgccggaagcaatggaaaaaccaagagtactcgtactgacaggggcagggatttctgcggaatcaggtattcgtacctttcgcgccgcagatggcctgtgggaagaacatcgggttgaagatgtggcaacgccggaaggtttcgatcgcgatcctgaactggtgcaagcgttttataacgcccgtcgtcgacagctgcagcagccagaaattcagcctaacgccgcgcatcttgcgctggctaaactgcaagacgccctcggcgatcgctttttgctggtaacgcagaatatagacaacctgcatgaacgcgcaggtaataccaatgtcattcatatgcatggggaattgctgaaagttcgttgttcgcaaagtggtcaggttctcgactggaccggagacgttacgccagaagataaatgccattgttgccagttcccggcacccttgcgcccgcacgtcgtttggtttggcgaaatgccactcggcatggatgaaatttatatggcgttgtcgatggctgatattttcattgccattggtacttccgggcatgtttatccggcggctgggtttgttcacgaagcgaaactgcatggcgcgcacaccgtggaactgaatctcgaaccaagtcaggtcggtaatgaatttgccgagaaatattacggcccggcaagccaggtggtgcctgagtttgttgaaaagttgctgaagggattataaagcaggaagcattgcctgatgcgctacgcttatcaggcctacaaggggacgcaattaattgaatttgcgggttttgtgggccggataaggcgttcgcgccccatccggcataatacacgcgcacttttccggcctcttttatcgtttactcgtcaataacaatgcggcaataaacgtacagacaccaattagccctgcccagagtggcgatattctggtaatcgcaaagctattatcgatatacaaacataaagcctgataacccatattggcaatagtcatcgccactgcaaattttaacgcataaataaaacgagtcgtgtagcaaaagatccaggaaaataagataaacgtcgcagcccaggcgataaaacctaatgtgttggtgctgccggggggagcattttcatgctgttgtcctggatgcggataatacgtcagtggcggcgtcggttgttttaatatctgtgcttgtagaacagccaatgcattattgattccctgataccagagatctgcatttaaataagccagcgtgtgattttctatcagaaggccgagatgtttatcgtccagaccactttcaacctggccgttggtgatcataattaaccgtggttcgcgggtagtaaatagtaacagaacacttccttttacattactcaatgaagatgacgcatgcgccagcatcgctttaccattttgtctgagactggcttcattattaatgtcgggtaaaatcacaataaacggtgcaattcccgtttgttggcgaaaaagctcggctttacgtgcgatctcttcagcatccggtacagtaccggtaacatccgtaaaaagtgtcttcattattggaatcaatggtttactggttgctaccagaggcaggagtatcagtaaactgagcagtataatgaattttttcatgggcgggacttccgtttcctgcgagattttttggtggaggggagcgtgattatcagaccgacactaccgaaaataatgcctgctatgccaacaaagccccatttaaaaaaattaacccagggattgtttatttcggcttgttctggatgccctggcggataatagacattgactctgtcaccttcgctatcttcataaaaatcactaccgatattcgaattgaaaattagcgtgtaatctggcgtagggcgaaaggcaaccactggataccaggaaccattatcatcgacgtcgtttgagtgattgttgtaccaaacggcatcaacaatgattccttctgtatgaaccgcgcttttggtaaaagtaaaatggtaataaaagatgattgcagaaataacgagtaatatcagaccgataccgagaaaagcgcgggataacactttactgtcctgactcattagccacatccttgctaaataaaaaacgggcggtaatgccaccgcccgcttgctgaattaacgtcctgctttcagcttctgataatactcttcataaatgctgctggctgcgccaacgtcattctgccattcaccatttttaatggtttcagcatccgggtagagcgttttatcgttcgccacttccgggcttaacagcttacgcgccgcaaggtttggcgttggataaccgatagtttcggcaacctgttttgccacatccgggcgcagcaggaagttgatcaatttcagcgcgccttctttgtttttggcatttgccgggatcgccaggctgtccatccagaaaatgccgccttctttcggccataccacgtcaattggcgtacccgcctggcgtgcaacgaaagcagaaccgttccagatcatgccgaggttaacttcgccttccatgtacgggttagccgggttatcggagttaaaggctgccacgtttggcatcagttttttcagctcgttatatgcagcttcaatctctttcggatcggtggtgttaccggagtagcccagcttacgcagcgccatctggaacacttcacgggcatcgtcggtcaacagcaggctgcctttgtactcaggcttccacagatcggcccagctggtgacagatttcggatccaccgcatcaccgttaacaccaatcgccgtcgcaccccagatatacggaatggagtaatcgttattcgggtcaaacggcttattgagcatgtctggatcgagattgctgaagttcgttaacttcgacttgtcgatcttctggatcatcccttctttacgcattttatcgacgtaataggttgaaggaaccaccaggtcataggcaccgtctttgtacgttttcagcttggcatacatggtttcgttcgactcgtaagtcgaatagataaccttaataccggtttctttggtgaactgttcaagcagtcctggcggcacgtactcggtccagttgtagaaatacagcgtgttgttgtcatcggcgtgagcggcgctcatgcccagtgccagagcacccgccgcgagcaggtggcgtgaccattttttcatttaacgtcccctgtgttacctttcgttttatcacgagcaataagctggctgnnnnnnnnnntaaccatcaccagcgacagcaccagtaatatggttgccagcgcgttaacttccggtgatacgccgactttgaccatcgaataaatttttaacggcagaatttcataacttggtccggtgacgaacgaagaaactaccacatcgtccatcgacagggtaaagcttaacacccagcccgccgccaccgcaggcattgccagtggcagaatgatttttcgcagaatggtaaattcactggcaccgagatctttcgccgcttccagcatccgcacgtcaaaacctttcaggcgcgaatacaccgtcaccaccacaaacggcaggcagaaggtgatatgcgagaacagcagcgaccagaagccaagctgaatatccagcagcataaacagcaccagcagagaaatcgccatcacgatatctggtgacatcatcaccacaaacagcattccgctaacgaacggcttaccacgaaagcgataacggtacagcgcaactgccgtcagtgaaccgataagcgtagcaaatgtcgccgaaaacaccgccattgttagtgaatgctgcgctgcctgtaacaggctgtcgttgttcatcagcaggctataccatttggtggtaaaaccctgccagttgatgccaaagcgcgagctgttaaaggagttcacaatcaaaataatgattgggatatacaggtacgcgtagatagcggtcataaaaccgccgcgaagcagtcgaccgatcattcgagttccacctttttattcagcagacgagaagcgcgccagtaaaccagcaacatcaggcccattacgatagtcagcgtaatgctggtggctgcaccaaacggccagtcacgaatattgaggaactggaccttgatgacgttaccgatcagcaggtttttcgcaccgcccatcaggtcggatacatagaacaggcccatcgctggcagcatcaccagcagacatccggcaataattcccggcatcgtcagtggaataatgatacggataaaagtctgtaacttgctggcaccgagatcgcgcgccgcctcaagcaacggcttatccagtttttcgatactggagtacagcggcatcaccataaacggtagcagaatgtaaaccagaccgataatcaccgcactgggcgtgaacatgatacgaattggtgtgtcgataacgcccagccagagcaaaaactcgttgagatagcctttggtgctgaggaaaattttcagcccgtagatgcgaatcagtgagttggtccagaagggaacaatcagcagaaacagcagcagcggacgcaccttgtgtggtagcttcgccagaaaccaggcaaacgggtagcccagcaccaggcaggcgagggtggcgatcagcgccatattcagcgagtgcaatagcacttcaaaatagagcggatcgagcagacgcgtgtagttatccagcgtaaagaccattttgacgaaactggcgtcgtcgcgggtcaaaaagctggtgccaatgatcatcaggttgggcagaaagacaaacaacacaagccaaccgacaatagtgacaatcactacattctggaacttacttgtgttcttcatcagccagtacgacctcccagctttctacccaattaatggccattttttggtcgagagagtggtcaaagtcagggtcgtcttcattgaagaattcgctgaccatcaccatcttgccattttccagttcaacaaccgactccagcgtcatgcctttgtagttacgctcacgaacgtaaccaatcagcccttcagcgtggttgtcgtcgttaatctcttcaacacgtaagtcttccgggcgcagcagaacatgcagtttttgccccggttcaacggcgaagttaacgtagatattacattcgcggccttcaacgttggcgcgtacgcgctgctcgtctagacgttcgatgacagtggcgttaaacatattgatttcgccaatgaagccggcaacaaacaggtttttcggctcttcgtaaatttcgcgcggtgtaccatcttgctcaatacgaccctcgcgcatcaccacaatcctgtctgacatggtgagcgcttcttcctgatcgtgagtgacaaagacgaaggtaataccaagcttacgctgtaacgctttcagctcgttctgcatttgcttacgcagtttgtaatccagcgctgagagcgactcatccagcaacaacagacgaggcttgttaaccaccgcgcgagcaatggcgacgcgttgctgttgaccaccagagagctgatgcggtttacgttgagcgaaggtttccagttgcaccatccgcagggcttccatcacgcggggcgtaatttcagcagcgggggttttttgcatgcgcaacccaaaggccacattttcgaacacggtcatgtgggggaaaagtgcgtagctttggaaaacagtgttcacatagcggttttccgccggaacgtgggtgatgtcctcgttatccagcatgatgcgtccggaatcaacagtttccagacctgcaatcaggcgaagaacggttgttttaccgcagccagaagggccaagcagcgtgaggaactcgccattgttgatagtcagatccagctggggaatgacctctttaccatcaaagcatttgcgaattcccgccaattgcaccagcggtgaaagcgaactcggttgtttattcaattttttactctgtcccatgtaaacgcaacggatggcttaccgatgcggggtttgtggttaaccaccttggtgactcttaatgagggcggtaattctacggcaaaccgcttgaatcgccaatctttgttgtgaattactggcttagctttatattcattaaggtaatgctgataaatattcccgcttgcaggggtaaaagtgacctgacgcaatatttgtcttttcttgcttcttaataatgttgtcacaaaaagtgagggtgactacatggataaactacttgagcgatttttgaactacgtgtctctggatacccaatcaaaagcaggggtgagacaggttcccagcacggaaggccaatggaagttattgcatctgctgaaagagcagctcgaagaaatggggcttatcaatgtgaccttaagtgagaagggcactttgatggcgacgttaccggctaacgtccctggcgatatcccggcgattggctttatttctcatgtggatacctcaccggattgcagcggcaaaaatgttaatccgcaaattgttgaaagctatcgcggtggcgatattgcgctgggtatcggcgatgaagttttatcaccggttatgttcccggtgctgcatcagctactgggtcagacgttgattaccaccgatggtaaaaccttgttaggtgccgatgacaaagccggtattgcagaaatcatgaccgcgctggcggtattgcaacagaaaaacattccgcatggtgatattcgcgtcgcctttaccccggatgaagaagtgggcaaaggggcgaaacattttgatgttgatgccttcgatgcccgctgggcttacactgttgacggtggtggcgtaggcgaactggagtttgaaaacttcaacgccgcatcggtcaatatcaaaattgtcggtaacaatgttcatccgggcacggcgaaaggagtgatggtaaatgcgctgtcgctggcggcacgtattcatgcggaagttccggcggatgaaagcccggaaatgacagaaggctatgaaggtttctatcacctggcgagcatgaaaggcaccgttgaccgagccgatatgcactacatcatccgtgatttcgaccgtaaacagtttgaagcgcgtaaacgtaaaatgatggagatcgccaaaaaagtgggcaaagggttacatcctgattgctacattgaactggtgattgaagacagttactacaatatgcgcgagaaagtggttgagcatccgcatattctcgatatcgcccagcaggcgatgcgtgactgcgatattgaaccggaactgaaaccgatccgcggcggtaccgacggcgcgcagttgtcgtttatgggattaccgtgcccgaacctgttcactggcggttacaactatcatggtaagcatgagtttgtgactctggaaggtatggaaaaagcggtgcaggtgatcgtccgtattgccgagttaacggcgcaacggaagtaagcgaaaagggatgcggcatgtgatgccgcatccggcttaaatccaaacttacccttcgaagaaccagtatccgctattgaccagcgccgcgagcatcgcgaggaatgacggatcttccagcgcatcgccaaaattctccgcggtcagcgcaatgttgctggcgagtgcatccagtgccggacggtgcgaggaatcgatcttctcaccattggcatacacgtcgtcgccaatgcgcaatacgcgcagaccacccaggcgcaccagcacatcaccttgtttcagcgcatcgtagatttcatctggctgataaggcggttccggcggcgcgatatccagttcatgacgtgactgggatataaactcgccaaaccattgcttaaagtgttccggctggttgatcaattcgagcatcatctcacgcagtttatccatttcttgcggcagaacgtccgcaggatgagcgcgaggtggaacatccggatcgctgtagtagttgccgcccagttcacgttgcagcacataatcggcaaatccgctaattaattcccgcgtatttggcgcgcgaaaacccacggaatagttcatcgcattttccagcgcgtagccttcatgcgggaatcctggcggaatataaagaatatcgccaggctccagctcttcatcgatgatggcttcgaacggatcgacctgtaacagatccgggtgtgggcagtgctgtttcatttgcagcttttcgcccactcgccagcgacgacgtccggtaccctgaatgataaacacgtcgtactgatcgagatgcgggccgacgccgccgccaggtacagaaaaagagatcatcagatcatcaatacgccagtccggtagttcacggaacggtcgcatcagcgcggcggtcggctcatgccagtgatttactgcttgcactaacaatgaccagttagtttcaccgagatgatcgtagctttcgaacggaccgtggctgacctgccatttgccatcctggtgactgaccagtcgactgtcgacttcgctttccatcgccagacccgccaactcgtctggagagatcgggtcaataaaattattaaagccgcgttttaacaccaccgggcgtttctgccagtgacgttcaagaaaatcgggccagttaagagtgagttggtattccatgttaagcatccacaggctggtatctgcaaccgattataacggatgcttaacgtaatgcgtgaagtatggacatatttattcatctttcggcgcagaatgctggcgaccaaaaatcacctccatccgcgcaccgcccagcatgctctctccggcgacgattttaccctcatattgctcggtgatttcgcgggctaccgccagccctacaccttgcccagggcgtaaagtatcaacccgttgaccacggtcgaaaatgacctctcgcttgcttaatggaataccgggtccatcatcctcgaccacaatatagagatgctcgtcggtttgccttgcagaaatttcgacaaactcgaggcaatatttacaggcattatccagcacattgcccatcacctcgacaaaatcgttctgctcaccgacaaagctgatctctggcgaaatatcgagagagatattgacccctttgcgttgatacactttgttcagcgccgaggtgagattgtccagcagtggggcgaccggatgcagctcgcggctaagcaatgtcccgccgcgcatactggcacgatgcaggtagtagccaatttgctgtgaaatgcggctgatttgctccagcattaccggttcagcatcactgacgctcatcttttcactacgcagagaacgcagcgtactttgcagcaccgccagtggcgttttcagactatgggtcaggtcggtgagcgtcgtacggtatttgtcgtaacgttcgcgttcactttttaacaatcggttcaggtttcgtaccagactggtcagttctcgcgttgtggctggattgagcaattcgcggttatgttcttccagttcgcggacttcttttgccagggcttcgatggggcgtaaactccaccaggcggcgacccacagcagcgggatcactaacagcagattggctgagagcacatagataaaccagctccagaccatataggaactttttagctccaccggaatggtatccaccaccacaatggttaactttggcattcgcgatgttgccgggtagacgtttaccgccaccgagtgggtcatctccgcgtcgtcgtcatcttcccgcacttcctgcaactgttgctgtatcgaatgatctccactcagcaagaggctggtatcgttaacatccgcttcaatttcatgaaaaccattcgatttcagccagtcaggctggatcatcttcatcagccagggcacgtcacgttgcgcccataaaagctgcccgttctcatcataaattagcgtcatggtggggctttgcttgtcgatattttctggtaactcgacatgcaacttattgttttcccacttcgcaagggtatagaacagattgctttcgccacgtaacagccgaaacgtagttttatcgaaactgacgctataaccgatcagcgcgaccattccgtaggcaagcgaaagcaccagtactaccgctgccgttgccaacagaaaacgtacccgcagcgagagcgggaaaaaaagacgcagtaattttttcatcagcgcaattcgaacagatagccctggccgcgaacggtggtaatcacttcttgcggatattgtgcctgaatttttttgcgcagacgtcccatcagtacatcaatggtatggctttcccgcagctccgcatccggatagagttgtagcattaacgaatctttgctcaccactttgccattattgcgtatcaacgtttccataatggtgtattcgaacgcggtcagtttgatcacttcgtcattaatagataattcacggcgagagagatcaacctgaaacggggggagcgaaatgacctgtgaagccagaccgctattacgccgcattaatgcctgcattcgcgccatcacctcttcaatatgaaacggtttagtcacataatcatcagcaccggcacttaatacttcgactttgtcctgccagctttcacgggcggttaataccagaatcggcagtgaaacatcgttgctacgccagcggcgaatcagtgacagaccgtcctcgtctggcaatccgagatcgacaatcgcaatatccggtatatgttcattgagataataatcggcttctttggcatcttctgcgtcatcgacctgatgaccagcatcctgaatctgaactttaaggtggtgacgtaacaacgcattgtcttcaacaaccagtacgcgcatttttatttctccctgtcttaattattaaaatagtgtaacgcgattatgtggttatgggggtaaacattaaataaaccagcggggaggggaggtaaagtgaaaaaataaaaagcggatagtcttaataagcaggccggacagcatcgccatccggcactgatacgaggtttatttcagctcatcaaccatcgtgatagctcgaccaatatagttagccggcgtcatcgctttcaggcgggctttctcttcttctggcaacgccagaccgtcgataaactgcttcatgccttcggcgtcaacgcgcttaccgcgagtcagctctttcagcttctcgtacggtttttcgatgccatagcgacgcataactgtctggattggctcagccagcacttcccagttgtgatccagttcatccagcagatggtcacggttcacttccagtttgctcacgcctttcagggtggattgatacgcaatcagcgcataaccgatacccacgccgaggttacgcagcacggtggagtcggtcaggtcacgctgccagcgggaaaccggcagtttgcttgccagatgctgcaataccgcgttggaaaggcccagattcccttcggagttttcgaagtcgatcgggttaactttatgcggcatggtggaagaaccaatctcaccagcaatggttttctgtttgaagtggttaagggcgatataaccccagacgtcacggtcaaagtcgatcagaatggtgttgaagcgcgcaacgcaatcaaacagttcggcaatgtagtcgtgcggttcaatctgggtagtgtacgggttccattgaatacccagcgaggtgacgaactcttcgctgaactgatgccagtcaacttccgggtaagcggcgatgtgggcgttatagttaccgaccgcgccgttgattttgccgaggatctccacctggttaagctggcggtactggcgctccatacggtaggcgacgtttgccatctctttaccgatggttgacggcgtggctggctgaccgtgggtacgagacagcagcgggatatcgcgatactgaacggcgagatctttaatgccatcaatcagttgacgccagtatggcaggatcacttcatcacgcgcggttttcagcattaatgcgtgggagaggttattgatatcttccgaagtacaggcaaagtggatgaattcagaaaccgcgtgcagttccgggatctccgccactttttctttcaggaaatactcaaccgctttaacgtcgtggttagtggtacgctcgatagttttgatgcgcgccgcatcttcttcgctgaaactggcgacgattgcatcaaggtaaccgattgcgtcggcagcaaaagcaggaacttccttgatcgctgcgtgcgcggccagtttttgcagccaacgtacttcaacttgtacacggaatttcagcaaaccatattcgctgaaaatcccgcgcagcgcgctgactttatcgccgtagcgtccatcgacaggggaaacggcggtcagtgaggataattccatagatcacaactccggggttaaatgagcaagaatttgttttgcctgagtggtcaggcgattacgagaaaacatcagttgcagacgtccgccgccgacctggtgccagagcacggcggcgcgaatgcctgccagcagggttgcgcgaactttcgcctgcacttgtgggctttgcagtacagcaggggaaccggtgacctgaatgcgcgggccaagcgggctaatcacatcaacatagatagcagccatcgcgctcatcagcgtttcggactgtaaatcgaagtgttcgagctggcgttgcaggccgttgatccggttgcccagagtgtcgagcgcgcctttcgctgaggagagtttgcgctcaagcaccatcaagctgagtgtgtagcgggttaattcggcgtttaagccctggcgactgctggcattgagcacgccgagcagggtttccagcccgacgcgcaggttggcttcgctaccgccaaaaaccgccagcgtcgagctggggttcatatcaataatactgttgagtgagacgtgtagcgcatcggcatcacaatgcccctggtgagcgagttgttgcaccaggcgtgccgactgacaaataccggccagggcgagggtgatgtcatagtaattctttgccacgttcactgcttccttgttttaagtaaagataataatcagac

SEQ ID NO: 266 - DNA, 15269 bp, Escherichia coli
  source 1..15269: mol_type = genomic DNA
ggttagactgttaacaacaaccaggttttctactgatataactggttacatttaacgccacgttcactcttttgcatcaacaagataacgtggctttttttggtaagcagaaaataagtcattagtgaaaatatcagtctgctaaaaatcggcgctaagaaccatcattggctgttaaaacattattaaaaatgtcaatgggtggtttttgttgtgtaaatgtcatttattaaaacagtatctgtttttagactgaaatatcataaacttgcaaaggcatcatttgccaagtaaataaatatgctgtgcgcgaacatgcgcaatatgtgatctgaagcacgctttatcaccagtgtttacgcgttatttacagtttttcatgatcgaacagggttagcagaaaagtcgcaattgtatgcactggaaaaatatttaaacatttattcaccttttggctacttattgtttgaaatcacgggggcgcaccgtataatttgaccgctttttgatgcttgactctaagccttaaagaaagttttatacgacacgcggcatacctcgaagggagcaggagtgaaaaacgtgatgtctgtgtcgctcgtgagtcgaaacgttgctcggaagcttctgctcgttcagttactggtggtgatagcaagtggattgctgttcagcctcaaagaccccttctggggcgtctctgcaataagcgggggcctggcagtctttctgcctaacgttttgtttatgatatttgcctggcgtcaccaggcgcatacaccagcgaaaggccgggtggcctggacattcgcatttggcgaagctttcaaagttctggcgatgttggtgttactggtggtggcgttggcggttttacaggcggtattcttgccgctgatcgttacgtgggttttggtgctggtggttcagatactggcaccggctgtaattaacaacaaagggtaaaaggcatcatggcttcagaaaatatgacgccgcaggattacataggacaccacctgaataaccttcagctggacctgcgtacattctcgctggtggatccacaaaaccccccagccaccttctggacaatcaatattgactccatgttcttctcggtggtgctgggtctgttgttcctggttttattccgtagcgtagccaaaaaggcgaccagcggtgtgccaggtaagtttcagaccgcgattgagctggtgatcggctttgttaatggtagcgtgaaagacatgtaccatggcaaaagcaagctgattgctccgctggccctgacgatcttcgtctgggtnnnnnnnnnngatgaacctgatggatttactgcctatcgacctgctgccgtacattgctgaacatgtactgggtctgcctgcactgcgtgtggttccgtctgcggacgtgaacgtaacgctgtctatggcattgggcgtatttatcctgattctgttctacagcatcaaaatgaaaggcatcggcggcttcacgaaagagttgacgctgcagccgttcaatcactgggcgttcattcctgtcaacttaatccttgaaggggtaagcctgctgtccaaaccagtttcacttggtttgcgactgttcggtaacatgtatgccggtgagctgattttcattctgattgctggtctgttgccgtggtggtcacagtggatcctgaatgtgccgtgggccattttccacatcctgatcattacgctgcaagccttcatcttcatggttctgacgatcgtctatctgtcgatggcgtctgaagaacattaatttaccaacactactacgttttaactgaaacaaactggagactgtcatggaaaacctgaatatggatctgctgtacatggctgccgctgtgatgatgggtctggcggcaatcggtgctgcgatcggtatcggcatcctcgggggtaaattcctggaaggcgcagcgcgtcaacctgatctgattcctctgctgcgtactcagttctttatcgttatgggtctggtggatgctatcccgatgatcgctgtaggtctgggtctgtacgtgatgttcgctgtcgcgtagtaagcgttgcttttatttaaagagcaatatcagaacgttaactaaatagaggcattgtgctgtgaatcttaacgcaacaatcctcggccaggccatcgcgtttgtcctgttcgttctgttctgcatgaagtacgtatggccgccattaatggcagccatcgaaaaacgtcaaaaagaaattgctgacggccttgcttccgcagaacgagcacataaggaccttgaccttgcaaaggccagcgcgaccgaccagctgaaaaaagcgaaagcggaagcccaggtaatcatcgagcaggcgaacaaacgccgctcgcagattctggacgaagcgaaagctgaggcagaacaggaacgtactaaaatcgtggcccaggcgcaggcagaaattgaagccgagcgtaaacgtgcccgtgaagagctgcgtaagcaagttgctatcctggctgttgctggcgccgagaagatcatcgaacgttccgtggatgaagctgctaacagcgacatcgtggataaacttgtcgctgaactgtaaggagggaggggctgatgtctgaatttattacggtagctcgcccctacgccaaagcagcttttgactttgccgtcgaacaccaaagtgtagaacgctggcaggacatgctggcgtttgccgccgaggtaaccaaaaacgaacaaatggcagagcttctctctggcgcgcttgcgccagaaacgctcgccgagtcgtttatcgcagtttgtggtgagcaactggacgaaaacggtcagaacctgattcgggtaatggctgaaaatggtcgtcttaacgcgctcccggatgttctggagcagtttattcaccttcgtgccgtgagtgaggctaccgctgaggtagacgtcatttccgctgccgcactgagtgaacaacagctcgcgaaaatttctgctgcgatggaaaaacgtctgtcacgcaaagttaagctgaattgcaaaatcgataagtctgtaatggcaggcgttatcatccgagcgggtgatatggtcattgatggcagcgtacgcggtcgtcttgagcgccttgcagacgtcttgcagtcttaaggggactggagcatgcaactgaattccaccgaaatcagcgaactgatcaagcagcgcattgctcagttcaatgttgtgagtgaagctcacaacgaaggtactattgtttctgtaagtgacggtgttatccgcattcacggcctggccgattgtatgcagggtgaaatgatctccctgccgggtaaccgttacgctatcgcactgaacctcgagcgcgactctgtaggtgcggttgttatgggtccgtacgctgaccttgccgaaggcatgaaagttaagtgtactggccgtatcctggaagttccggttggccgtggcctgctgggccgtgtggttaacactctgggtgcaccaatcgacggtaaaggtccgctggatcacgacggcttctctgctgtagaagcaatcgctccgggcgttatcgaacgtcagtccgtagatcagccggtacagaccggttataaagccgttgactccatgatcccaattggtcgtggtcagcgtgaattgatcatcggtgaccgtcagaccggtaaaaccgcactggctatcgatgccatcatcaaccagcgcgattccggtatcaaatgtatctatgtcgctatcggccagaaagcgtccaccatttctaacgtggtacgtaaactggaagagcacggcgcactggctaacaccatcgttgtggtagcaaccgcgtctgaatccgctgcactgcaatatctggctccgtatgccggttgcgcaatgggcgaatacttccgtgaccgcggtgaagatgcgctgatcatttacgatgacctgtctaaacaggctgttgcttaccgtcagatctccctgctgctccgtcgtccgccaggacgtgaagcattcccgggcgacgtattctacctccactctcgtctgctggagcgtgctgcgcgtgttaacgccgaatacgttgaagccttcaccaaaggtgaagtgaaagggaaaaccggttctctgaccgcactgccgattatcgaaactcaggcgggtgacgtttctgcgttcgttccgaccaacgtaatctccattaccgatggtcagatcttcctggaaaccaacctgttcaacgccggtattcgtcctgcggttaacccgggtatttccgtatcccgtgttggtggtgcagcacagaccaagatcatgaaaaaactgtccggtggtatccgtaccgctctggcacagtatcgtgaactggcagcgttctctcagtttgcatccgaccttgacgatgcaacacgtaagcagcttgaccacggtcagaaagtgaccgaactgctgaaacagaaacagtatgcgccgatgtccgttgcgcagcagtctctggttctgttcgcagcagaacgtggttacctggcggatgttgaactgtcgaaaattggcagcttcgaagccgctctgctggcttacgtcgaccgtgatcacgctccgttgatgcaagagatcaaccagaccggtggctacaacgacgaaatcgaaggcaagctgaaaggcatcctcgattccttcaaagcaacccaatcctggtaacgtctggcggcttgccttagggcaggccgcaaggcattgaggagaagctcatggccggcgcaaaagagatacgtagtaagatcgcaagcgtccagaacacgcaaaagatcactaaagcgatggagatggtcgccgcttccaaaatgcgtaaatcgcaggatcgcatggcggccagccgtccttatgcagaaaccatgcgcaaagtgattggtcaccttgcacacggtaatctggaatataagcacccttacctggaagaccgcgacgttaaacgcgtgggctacctggtggtgtcgaccgaccgtggtttgtgcggtggtttgaacattaacctgttcaaaaaactgctggcggaaatgaagacctggaccgacaaaggcgttcaatgcgacctcgcaatgatcggctcgaaaggcgtgtcgttcttcaactccgtgggcggcaatgttgttgcccaggtcaccggcatgggggataacccttccctgtccgaactgatcggtccggtaaaagtgatgttgcaggcctacgacgaaggccgtctggacaagctttacattgtcagcaacaaatttattaacaccatgtctcaggttccgaccatcagccagctgctgccgttaccggcatcagatgatgatgatctgaaacataaatcctgggattacctgtacgaacccgatccgaaggcgttgctggataccctgctgcgtcgttatgtcgaatctcaggtttatcagggcgtggttgaaaacctggccagcgagcaggccgcccgtatggtggcgatgaaagccgcgaccgacaatggcggcagcctgattaaagagctgcagttggtatacaacaaagctcgtcaggccagcattactcaggaactcaccgagatcgtctcgggggccgccgcggtttaaacaggttatttcgtagaggatttaagatggctactggaaagattgtccaggtaatcggcgccgtagttgacgtcgaattccctcaggatgccgtaccgcgcgtgtacgatgctcttgaggtgcaaaatggtaatgagcgtctggtgctggaagttcagcagcagctcggcggcggtatcgtgcgtaccatcgcaatgggttcctccgacggtctgcgtcgcggtctggatgtaaaagacctcgaacacccgatcgaagtcccggtaggtaaagcgactctggnnnnnnnnnncgtactgggtgaaccggtcgacatgaaaggcgagatcggtgaagaagagcgttgggcgattcaccgcgcagcaccttcctacgaagagctgtcaaactctcaggaactgctggaaaccggtatcaaagttatcgacctgatgtgtccgttcgctaagggcggtaaagttggtctgttcggtggtgcgggtgtaggtaaaaccgtaaacatgatggagctcattcgtaacatcgcgatcgagcactccggttactctgtgtttgcgggcgtaggtgaacgtactcgtgagggtaacgacttctaccacgaaatgaccgactccaacgttatcgacaaagtatccctggtgtatggccagatgaacgagccgccgggaaaccgtctgcgcgttgctctgaccggtctgaccatggctgagaaattccgtgacgaaggtcgtgacgttctgctgttcgttgacaacatctatcgttacaccctggccggtacggaagtatccgcactgctgggccgtatgccttcagcggtaggttatcagccgaccctggcggaagagatgggcgttctgcaggaacgtatcacctccaccaaaactggttctatcacctccgtacaggcggtatacgtacctgcggatgacttgactgacccgtctccggcaaccacctttgcgcaccttgacgcaaccgtggtactgagccgtcagatcgcgtctctgggtatctacccggccgttgacccgctggactccaccagccgtcagctggacccgctggtggttggtcaggaacactacgacaccgcgcgtggcgttcagtccatcctgcaacgttatcaggaactgaaagacatcatcgccatcctgggtatggatgaactgtctgaagaagacaaactggtggtagcgcgtgctcgtaagatccagcgcttcctgtcccagccgttcttcgtggcagaagtattcaccggttctccgggtaaatacgtctccctgaaagacaccatccgtggctttaaaggcatcatggaaggcgaatacgatcacctgccggagcaggcgttctacatggtcggttccatcgaagaagctgtggaaaaagccaaaaaactttaacgccttaatcggagggtgatatggcaatgacttaccacctggacgtcgtcagcgcagagcaacaaatgttctctggtctggtcgagaaaatccaggtaacgggtagcgaaggtgaactggggatctaccctggccacgcaccgctgctcaccgccattaagcctggtatgattcgcatcgtgaaacagcacggtcacgaagagtttatctatctgtctggcggcattcttgaagtgcagcctggcaacgtgaccgttctggccgacaccgcaattcgcggccaggatctcgacgaagcgcgagccatggaagcgaaacgtaaggctgaagagcacattagcagctctcacggcgacgtagattacgctcaggcgtctgcggaactggccaaagcgatcgcgcagctgcgcgttatcgagttgaccaaaaaagcgatgtaacaccggcttgaaaagcacaaaagccagtctggaaacaggctggcttttttttacgcgtgatccgtcctgaagagcgttcacatagatcctgctgatataaaacacccctgttttcccgtttattcattgatcgaaataagagcaaaaacatccacctgacgcttaaatgaaggtactgccttaattttctgcagacaaaaggcgtgacgatggtcgaaaatggcactttcgtcagcggggataatccgttattgaacaatttatcctctgtccatttcacgatgaaaaaaatgtagttttttcaaggtgaagcggtttaaattcgttctcaaattacagtcaggacgcgtatgttgaataatgctatgagcgtagtgatccttgccgcaggcaaaggcacgcgcatgtattccgatcttccgaaagtgctgcatacccttgccgggaaagcgatggttcagcatgtcattgatgctgcgaatgaattaggcgcagcgcacgttcacctggtgtacggtcacggcggcgatctgcttaaacaggcgctgaaagacgacaaccttaactgggtgcttcaggcagagcagctgggtacgggtcatgcaatgcagcaggccgcacctttctttgccgatgatgaagacattttaatgctctacggcgacgtgccgctgatctctgtcgaaacactccagcgcctgcgtgatgctaaaccgcagggtggcattggtctgctgacggtgaaactggatgatccgaccggttatggacgtatcacccgtgaaaatggcaaagttaccggcattgttgagcacaaagatgccaccgacgnnnnnnnnnncaggagatcaacaccggcattctgatcgctaacggcgcagatatgaaacgctggctggcgaagctgaccaacaataatgctcagggcgaatactacatcaccgacattattgcgctggcgtatcaggaagggcgtgaaatcgtcgccgttcatccgcaacgtttaagcgaagtagaaggtgtgaataaccgcctgcaactctcccgtctggagcgcgtttaccagtccgaacaggctgaaaaactgctgttagcaggcgttatgctgcgcgatccggcgcgttttgatctgcgcggtacgcttactcacgggcgcgatgttgaaattgatactaacgttatcatcgagggcaacgtgactctcggtcatcgcgtgaaaatcggcaccggttgcgtgattaaaaacagcgtgattggcgatgattgcgaaatcagtccgtataccgttgtggaagacgcgaatctggcagcggcctgtactattggcccgtttgcccgtctgcgtcctggtgctgagttgctggaaggtgcacacgtcggtaactttgttgagatgaaaaaagcgcgtctgggtaaaggctcgaaagctggtcatctgacttacctgggcgatgcggaaattggcgataacgttaacatcggcgcgggaaccattacctgcaactacgatggtgcgaataaatttaagaccattatcggcgacgatgtgtttgtcggttccgacactcagctggtggccccggtaacagtaggcaaaggcgcgaccattgctgcgggtacaactgtgacgcgtaatgtcggcgaaaatgcattagctatcagccgtgtgccgcagactcagaaagaaggctggcgtcgtccggtaaagaaaaagtaattctggccgggtaatccggtcatctgggatgaggagataacataatctccctcccacaagcagtaactataaaaataaccccactctctacaaggctcggggcgcccgaaaaaacgggcatacaggttgaccgacaacgatataaatcggaatcaaaaactatgtgtggaattgttggcgcgatcgcgcaacgtgatgtagcagaaatccttcttgaaggtttacgtcgtctggaataccgcggatatgactctgccggtctggccgttgttgatgcggaaggtcatatgacccgcctgcgtcgcctcggtaaagtccagatgctggctcaggcagcggaagaacatcctctgcatggcggtacgggtattgctcatactcgctgggcgacccacggtgaaccttcagaagtgaatgcgcatccgcatgtttctgaacacattgtggtggtgcataacggcatcatcgaaaaccatgaaccgctgcgcgaagagttaaaagcgcgtggctataccttcgtttctgaaacagacaccgaagtaattgcccatctggtgaactgggagctgaaacagggcggtactctgcgtgaggctgttctgcgtgctatcccgcaactgcgtggtgcgtacggtacagtgatcatggactcccgtcacccggataccctgctggcggcacgttctggtagtccgctggtgattggcctgggtatgggcgaaaactttatcgcttctgaccagctggcgctgttgccggtgacccgtcgctttatcttccttgaagagggcgatattgcggaaattactcgccgttcggtaaacatcttcgataaaactggcgcggaagtaaaacgtcaggatatcgaatccaatctgcaatatgacgcgggcgataaaggtatttaccgtcactacatgcagaaagagatctacgaacagccgaacgcgatcaaaaacacccttaccgggcgcatcagccacggtcaggttgatttaagcgagctgggaccgaacgccgacgaactgctgtcgaaggttgagcatattcagatcctcgcctgtggtacttcttataactccggtatggtttcccgttactggtttgaatcgctggcaggtattccgtgcgacgtcgaaatcgcctctgaattccgctatcgcaaatctgccgtgcgtcgtaacagcctgatgatcaccttgtcacagtctggcgaaaccgcggataccctggcgggcctgcgtctgtcgaaagagctgggttaccttggttcgctggcaatctgtaacgttccgggttcttctctggtgcgcgaatccgatctggcgctgatgaccaacgcgggtacggaaatcggcgtggcatccactaaagcattcaccactcagttaactgtgctgttgatgctggtggcgaagctgtctcgcctgaaaggtctggatgcctccattgaacatgacattgtgcatggtctgcaggcgctgccgagccgtattgagcagatgctgtctcaggacaaacgcattgaagcgctggcagaagatttctctgacaaacatcacgcgctgttcctgggccgtggcgatcagtacccaatcgcgctggaaggcgcattgaagctgaaagagatctcttacattcacgctgaagcctacgctgcaggcgagctgaaacacggcccgctggcgctgattgacgcggatatgccggttatcgtcgttgcaccgaacaacgaactgttggaaaaactgaaatccaacattgaagaagttcgcgcgcgtggcggtcagttgtatgtcttcgccgatcaggatgcgggttttgtaagtagcgataacatgcacatcatcgagatgccgcatgtggaagaggtgattgcaccgatcttctacaccgttccgctgcagctgctggcttaccatgtcgcgctgatcaaaggcaccgacgttgaccagccgcgtaacctggcaaaatcggttacggttgagtaatcactatcatagataaaaaagggctgccgaccggtggcccttttttataactgacatcaataaattcatctatctttctatataaatatattctgaattatcattaatgtctgataacaaacttgattttttactgtttaaataatatttaaacaataaatttatattttatttttgcgtaattaatattatttttagataaagccgtctctttggtgtactattcctttgaatcaaaaatacacttattaatataagtgatgattcatggtaaaggatatattatatcaatggagtttttatgaagcgtaatattataggcggtgcattcactctggcatctctaatgctggccgggcatgcactggcagaagatggtgttgttcacttcgtcggtgaaattgtcgacactacttgtgaagttacctccgatacagccgatcaaattgtcccactgggtaaagtcagtaaaaatgcattttcaggtgtaggtagtctggcgtcgccacagaagttcagtattaaacttgaaaattgcccggcaacgtacactcaagcagccgttcgttttgatggtacagaagcgcctagcggcgacggcgacctgaaagtgggtacgccgcttacagcaggcaaccctggtgattttaccggtacaggacaagcgattgcggcaaccggcgttggtattcgtatttttaaccagtccgataattcgcaggttaaactttataacgactctgcttataccgctatcgatgctgaaggcaaggctgaaatgaagtttattgcacgctatgtggcaaccaatgcgaccgtaacggctggtacggcgaacgctgattcacaatttactgtcgaatataagaaataatttatcaagggcctttttattcagttggctttggccagggagtcgttatgtccagaaaaagttgtttaatcaggctctttaaaacaacagtttcatgtaagttatttaccgcgattatactcagcgtttttttaggccaaccagcattaacttatgcaggcgttgtcattggtggtacgcgggtggtttacttaagtaataatgctgataaatctatttctgtatttagcaaagaagaaaaaataccttatctcatccaggcttgggtagatccatttaataaagaggataaaagcaaagcgccgtttaccgttattccgccagtatcacgattagaaccttcgcaagaaaaaatattacgcattattcacaccaaaggtgtgtcattgcctgatgatcgcgagtcagtcttctggctgaatattaaaaatattccgccatcagcgagcaacaaagcgacgaactcgctggaaatagcagtaaaaacgcgtatcaagctgttctggcgaccagcaaatatccgccttattcccgaagatgctgcgccgaaagtgaaatggcgccgggaagggcgaaatctgatagcagagaatcccaacccaattcatatcagtgtgatggatgtcatcgttgatggccatgatgtgcccctcaatatgatccgtccttttgaaacgctcacgttacctttacctgctaattctgcgggaggccaaatgacctggcgatttattaatgattacggcgcagtcagtgacccgataaaaatgacgctgtaagcaagggataaggataggcgtattatgatgacgaccagaatagtggttggcctcacggcagggacgtgtctgattttctcgcaaaacctgatggccgaggtcagtgtattcaatccggcgcttctggaaatcgaccatcaatccggagtcgatattcgccagtttaatcgggcaaacctgatgcccccaggtgtttatagcgttgatatttttatcaacggtaaaatgtttgaacgtcaggatgtgacatttgttcaggataatccagatgctgatctgcacgcttgctttattgccattaaaaacacactgtcctcctttggcataaaagttgatgcgctcaaatcgttcaatgatgtggatgagacggtttgcctcgatcctgctccacgtattgaaggctcatcctggcagtttgacagtgataaattgcagctgaatatatccattccccaaatctacatggacgcgatggcttatgattacatcagccccacgcgttgggatgaggggattaacgcgctcaccatcaactacgatttttctggttcacatacactacgttcagattatggttcacaagagacagataccagttatctcaatctgcgcaatggactgaatattggaccgtggcggctacgtaattacagtactttaaacaccagcgatggccgtgcggaatacaactccattagtacctggatacagcgcgatattgccgcgttaagaagccagattatgattggtgatacgtggacggcgagcgatattttcgacagtacgcaaattcgcggcgcgcgtttgtatactgataacgatatgctacccgccagccagaatggctttgctcctgtggttcgtgggattgcaaagtccaacgccaccgtcatcattcggcagaatggctacgtgatttatcagtctgccgttccacaaggtgcttttgagatcaccgatctcaacaccgccagtacaggtggcgatttggacgtaaccatcannnnnnnnnnaagacggtagcgaacaacgattcacccaaccttatgcttcattggcgattcttaaacgtgaaggtcagacagatgttgatgtcagcgtgggtgaattgcgcgatgaagacggatttacaccggacgtccttcaggcgcaaatacttcatggtttttcccacgggatcactttatatggaggtatgcaggctgctgaaaattatggttctgcagctctgggtgtcggtaaagatcttggcgctttgggcgcaatttctttcgatgtgacacatgctcgtgcgaattttagccatgatgatacagaaacgggtcagtcatatcgctttctctattcaaaacgatttgacgacacagacactagcttgcgcctggttggctatcgttactccaccgagggctactataccctcaatgagtgggcatcgcggcgcaacagccctgaagacttttgggaaacaggtaaccgacgtagtcgcgtggagggaacgctaacgcagtcgttggggagagattatggcaatttatacctgacattaagccggcaacaatactggcataccgatgatgtcgaacgattaatgcaatttggctacagcagtagctggaagcgtctctcgtggaacgtctcctggagttattccaatactgccagacaggggacggggaacaaccatgccagtgataacaccagtgagcagatctacatgctctctttatctgttcctttatcgggctggtggggtaatagttacgccacctattctgtttcgcaaaacgataattccggtagctcacatcaactcggactcagcggtacggcgctggaaagaaataacctttcatggaatttaatgcagtcctataacagtcatgatgatgaggttggcggtaatatgtccctgacctatgatggctcttatggcacggtgaacggcagctataactacagccaaaattcccagaggctgaattatggtatcagagggggaattctggcacacagcgaaggggtaacgttaagtcaggagttaggtgaaactattgctcttgttaaagcacctggggccgccgggttagaaatagataatatgcgcggtgctgcgacggactggcgcggctataccgtcaagacacagctaaacccttatgatgaaaatcgggtagcaatcagcgataactatttctcgaagtcgaatatagaacttgataataccgtcgttacgatggttcccacgcgtggtgcagtggttaaagcggagtttgtgactcatgtgggttatcgcgttctcttcagagtgttaaatgcaaatggtaaaccggtactgagagatcccctcataatttccccaaagcgtaaccatgtgtgaataaattttgagctagtagggttgcagccacgagtaagtcttcccttgttattg

SEQ ID NO: 267 - DNA, 15173 bp, Escherichia coli
  source 1..15173: mol_type = genomic DNA
tttaagaagagaacaaaggaatattatcagttcagctcgcaaacgaattcccgtacactgaactctctggctcactgagggcaccatcatggcactcccccgtattacccaaaaagagatgactgaacgcgagcagcgtgaacttaaaacactgctggatcgggcgcggattgcgcatggtcgcgtactgaccaactccgaaaccaacagcattaagaaagagtacatcgataaattaatggtcgagcgtgaggctgaagcgaaaaaagcccgccagttgaagaaaaagcaggcttataaaccggatcctgaagcgtcatttagctggtcagcaaatacgtcgacgcgcggcaggcgctgattagcgtcccttctttttacgccccggcgaggtaaaacgcttaccgttggacgccgggcgaccgcctttttccgccgttttttccatcttaacgactggacgtttgatgcccgctgttttcggtttagccttcgctttaggttttacctcggaagaggaattttcaatgagtttaaacaggtcgattaactcatcgtcagttaaatcgcgccactcacccagcggaatgccgcttaaactgacgttcataatgcgcgtacgttccagctttttcacttcatagccgaaatgctcgcacatgcgccggatctgacggttcagcccctgcaccagggtaatgcggaagacaaacggcgcttcttttttgactttgcactttttcgtcaccgtcccgaggatcggcacccccgcccccataccacgaataaattcatcggtaatcggtttatcgaccgtcaccagatactctttctcatgatcgttacccgcacggaggatcttattcaccagatcgccgtgattggtgaggaaaatcagcccctgggagtctttatccaggcggccaatcgggaacacgcgtttgctgtggttaacgaaatcgacaatgttatcgcgctcgccatcttcggtggtgctgacaataccgacgggcttgttcagggcgataagtaccaaatcttcggcttcccgaggctcaatcaactgaccgtttactttcacaatgtcgccgggtttcacctgatcgcctatggtggctcgcttgccattaaggaacacattgccttgctcgatatagcgatccgcttcgcggcgtgagcaaattccgctttcgctgatgtatttatttaaacggactgatgagtcgggcagcataaattctcctgtaaaacgcggaatataccgtacctcttagcggggaaaaacagggttatgcggcaacgtcgaaattaaatgtgatctgccacgccttttatcacaaaagtgtctccggaagtacgatgcaaatttgcctggcaaaataaggataatcaacatattacgaatcgctgcacacctgtgctgatgactactacgcagagaaacaaatgtgcaagagaaagcgctatttctccccatgcaaagagtgaaaaatcgctttgaaaggccctcatgatggggttatatcagatcaagcggtgagaaagcgtatttgcacaaatgtgcagaaccaggaggcggcaatggaaaacagtgacgatatccgtttgattgtgaagattgcccaactctattacgaacaggatatgacgcaggcgcaaatcgcgcgcgaactgcgtatttaccgcaccaccatcagccgcttgcttaaacgaggccgcgatcagggaattgtcaccatcgccatcaactatgactacaacgaaaatctctggctggagcagcaactgaagcaaaagtttggcctgaaagacgttgtggtggtgtcgggaaatgatgaggatgaagagactcaactggcgatgatggggttacacggcgcgcaactgctggatcgcttgctggagcctggcgatattgtcggtttttcctggggtcgcgcggtgagcgcactggttgaaaacttgccgcaggcggggcaatcgcggcagttaatctgcgtaccaattattggcggaccgtccggtaaactcgaaagccgctatcatgtaaacacattaacctacagcgcggcagcgaagctgaaaggggaatcgcatctcgcggattttccggctctgctggataacccattaattcgtaatgggatcatgcagtctcagcactttaaaaccatctctgcctactgggataatctggatgtcgccctggtgggaattggctcaccggccattcgcgacggcgctaactggcatgcgttttatggtggtgaagagagtgacgacctgaatgcccgccaggttgctggcgatatttgctcgcgcttttttgatattcacggcgcaatggttgaaacgaatatgagcgaaaaaacgctctctatcgaaatgaataaattaaagcaggcgcgatattccattggcattgccatgagtgaagaaaaatacagcggaattattggtgcactgcgtggaaaatatattaattgtctggtaacgaatagcagcacagctgaactattactgaaataaaaatcttcccgatgtttaccgtaataaaaattacggcgggtccctattatctaaaatcaggagtctgttatgcaaacgtggttaaatttgcaggataaaatcattatcgtcaccggcggcgcatccggtattggtctggcgattgtagaggaattattagcacaaggcgcaaacgtacagatggtagatattcacggtggcgatggtcaatatgaaggtcataaaggctatcagttttggccgaccgatatttccagcgccaaagaggtaaatcatacggtagcggaaattatccagcgttttggtcgcatcgacggtctggtcaataacgccggggtcaatttcccgcgtctgctggtcgatgagaaagcgcctgccgggcagtatgaactcaacgaagctgcattcgaaaaaatggtcaatatcaaccagaaaggcgtttttctgatgtcgcaggcggtggcgcgacagatggtcaaacaacatgatggcgtgattgtgaatgtttcctcagaaagtggactggaaggctcagaaggccaaagctgttacgccgctaccaaagccgcgcttaatagcttcacgcgctcctggtcgaaagagctgggtaaacacggtatccgtgtggtcggtatcgcgcccgggattctggaaaaaaccgggctacgcacgccggaatatgaagaggcgctggcgtggacgcgcaatatcaccgtcgagcagctgcgtgaaggctataccaaaaacgccattcctattgggcgcgccggaagattagcagaagtcgctgattttgtttgttatctgttgtctaaacgcgccagctacatcaccggagtaaccactaacattgcgggcggcaaaacgcgcggctaaggaggctttatggtcaacgccattttttgtgcccacggcaaattagcttgcgccatgctggaatcggttcagatggtttacggcaacgccaatgttgaagccgttgaatttgtgcccggcgagaacgccggagacatcgtagcaaagctggaaaagttagtaagcattcacaatcaagatgagtggctgattgccgtggatttacagtgcggcagcccgtggaatgcggcagcgatgcttgcgatgcgcaatcctcgtctgcgggtaatcagcggcctttctctgccgctggcgctcgaactggttgataaccaggacagcatgaatgttgatgaactgtgtgaacacctgacgcaaatcgcaaagcaaacctgcgttgtctggaaacaactggcaacggcagaggaggatttctgatgaacattacgctcgcccgcattgatgaccgcctgatccacggtcaggtcactaccgtctggtcgaaagtggctaacgcccagcgcattattatctgcaatgacgaagtttataacgatgaagttcgccggacattattgcgtcaggctgcgccaccgggaatgaaggttaacgtggtcaatattgaaaaagccgtcgctgtttatcacaacccgcaatatcaggacgaaaccgttttttatcttttcactcgcccacaggatgccttagcgatggttcgccagggggtaaaaatagacaccctgaatattggcggcatggcctggcggcccggtaaaaaacagttaaccaaagcggtttcattagatgatgatgatattaacgcatttcatgagttaaataatcttggcgtcatactggatttacgcgtcgtagcgtcagatccctcaatcaatattatcgacaaaataaacgaacagttaatcgcaaattaaataatagcgcctgtgtacatatgctttaacaggcagggatgacgacacttaaaaggtgaaaaatcatggaaataagtaccctacaaatcattgctatatttcttttttcctgtattgccggaatgggcagcgtgctggatgaatttcagactcatcgcccgttaattgcctgtacggtgattggtttaattctcggtgatttaaaaaccggaataatactcggtggtacgctggaattgatagctctcggctggatgaacgtcggcgcggcgcaatctccggattctgcactcgccagcataatctccgccattctggttatcgttggtcagcaaagcatcgccaccggaatcgccatcgcgttgcctgtggctgcggcaggccaggtgctgactgtgtttgcccgtaccatcaccgtagtgttccagcacgcggcggataaagcagcggaagaagcacggtttcgcactctcgatattctgcatgtctccgcgcttggcgtgcaggcgctgcgcgttgctattccggcactgattgtctcactgttcgtcagcgccgatatggtgagcaatatgctgagcgcgataccggaattcgtgacgcgcggtctgcaaattgctggcggttttatcgtggtggtcggttacgccatggtgctacgtatgatgggcgtgaaatatttgatgcctttctttttcctcggtttcctcgcaggtggctacctcgatctcagtctgctggcgttcggtggcgtcggcgtgatcatggccctggtctacatccagctaaatccacagtggcgtaaagctgaacctcaaccccaggccaccacctccaccgcccttgaccaacttgacgattaacggagccatcatggaacagagaaaaattacacgcagcgatctggtgagcatgtttctgcgctccaacctgcaacaggcgtcctttaactttgaacgtattcacgggctgggcttttgctacgacatgatccccgccatcaagcgactttacccattaaaagaggatcaggttgcggcgctcaggcgacacctggtgttcttcaataccacgccagccgtatgtggcccggtcatcggcgtcactgccgccatggaagaggcgcgggccaacggcgcggaaattgatgacggtaccattaacggcatcaaagtcggtctgatgggaccattggcaggggttggcgatccactggtttggggaacgctgcgcccgattaccgctgcgctcggcgcatctctggcactttctggcaacatcctcggcccgcttttgtttttctttattttcaatgcggtgcgtctggcgatgaagtggtatggcctacagctcggctttcgcaaaggggtgaatatcgtcagcgatatgggcgggaatgtgctgcaaaaactcaccgaaggcgcgtcgattctcggactgtttgtgatgggcgtgctggtcaccaaatggacgtcaatcaacgtaccgttggtggtttcacaaacgcatgccgccgatggctccaccgtcaccatgaccgtgcagaacattctcgaccaactttgccctggtttgctggcgctcggtctgacgctgcttatggttcgtctgctcaacaaaaaaattaacccggtatggctgattttcgccctgtttggcttagggattatcggtaatgcgctgggcttcctgtcctgattcttcgccccggcacgactgccggggccatcgctcaacatgaggtggtttatgaaaacaacagctctgcgtctttatggtaaacgtgatttacgcctggaaacctttgaccttcctgaaatgcaggaggatgaaatcctcgcgacggtggtcactgacagcctgtgcctctcttcctggaaagaggccaatctgggtgaaaaccataaaaaagtacccgacgatgtggcgaccaaccccatcatcatcggccacgagttttgcggcgatattctggccgtgggtaaaaagtggcagcacaaattccagccgggtcagcgttatgtgattcaggccaacctgcaactccccgaccgcccggactgccccggctactccttcccgtgggtgggcggcgaagccacgcatgtggttattcccaacgaggtcatggaacaagattgcctgctggcatacgacggcgaaacctattttgaaggctcactggttgaaccgctttcctgcgtgattggcgcgttcaacgccaactatcatcttcaggaaggtagttataaccacacgatggggattcgcccgcaagggcgcatgctgatcctcggcggcaccggaccaatgggactgttggcgattgattatgcgctacatggacccgttaacccgtcgctgctcgtcattaccgataccgacaacgataaattgagttatgcgcgcaagcactatccatcagaaccgcaaacactgattcattatctcaatgccgccgatgcagcatttgatacgctaatggcgctgagtggcggtcacggcttcgatgatattttcgtctttgtgcctaatgaaggactggtgactctcgcctcttccttgctggcgacagatggttgcctgaatttcttcgccggaccgcaggataaacatttcagcgcgccaattaatttctacgatgtgcattatgcatttacccactacgtgggcacgtcaggcggcaataccgacgacatgcgcgcggcggtcaaactgattgaagagaaaaaagtgcaggccgcaaaagtggtaacacatattcttgggctgaatgccgcgggcgaaaccacgcttgaattgcctgccgtcggcggcggcaaaaagctggtgtataccgggaaatacctgccgctgacgtcactcacgcagattcaggatcaagcactggcggcgattctggcgcgtcatcaggggatctggtccggtgaggcggagcaatatctgctcactcatgcagaggcaatttcccatgattaatcgcgctacttaactctgcatgtcgctggctggtcgccgcggcaacttcgcgacctgatgtgcggctgattgctgaagcggcccaatgtgcacgagaaggataaaaaaacatcagcgccttaaggggcgctcaaattggtggcaaagtacacattgtttatgccggatgcggaataaagccttattcggcctacataatctcgaaaattcaatatattgcagttatctggtaggcctggtaagcgtagcgcatcaggcaatgctgtgtttgtcatcagtctcagcgcccggtgcaatacgtgacatcgtgagccatgtcagtaagtggttaaattcgcagtggtagcatgcctcccgtgatttcttactaactggagaagtaatggaactgcttttattgagtaactcgacgctgccgggtaaagcctggctggaacatgcgctgccgctgattgctgaacagttgcagggtcgccgttcagcggtatttattcctttcgctggcgtaacgcagacctgggatgattacacagcgaaaacggctgcggttctcgctccgctgggtgtatctgtaaccggtattcatagcgttgtcgatcccgttgccgcgattgaaaatgctgagatcgtgattgtcgggggcgggaatactttccagttgctgaaacagtgccgcgagcgcgagctgctggcaccaattactgacgtggttaaacgtggtgcgctgtatattggctggagcgcaggcgctaaccttgcttgcccaaccattcgtaccaccaacgatatgccgattgtcgatccgcaaggtttcgatgcgctaaatctgttcccgctgcaaatcaacccgcacttcaccaacgcgctgccggaaggccataaaggtgaaacccgtgagcagcgtattcgcgaactgctggtcgtcgcgccagaactgacgattattggtctaccggaaggtaactggatcacagtgagtaaaggtcacgctacgctgggtggcccgaacaccacttatgtgtttaaggctggtgaagaagcggtgccgctagaagctggtcaccgtttttaagtaaattgccggatgcatgatccggcatcttgttcatagtgcctgatgcgacgcttgacgcgtcttatcaggcctacaggattcacaatattaatactcgtcccgtccttcatcttcatccggctgttccagcacactgtaagccaccgaacaaaacagcgagttcaggcgctgcatatctcccagtaagcctaaatgtagcgaactggtttcaatgctctgcacgttttgctgatgcaggcgatcgacgtgggcgtgggaatagcggcgattaagaatgcgaaaacgatgtttgctgcgacgcaaacgacgagcgctggtgacatcgccagagaagaacaccgacattgccagctttaaattactgagcaattgctcatagagcgcatccagttccttcaacccatcaagcgaaaatgcccgccgtgctgccagcgatttatcggcaatttcgctgcccatgcgctcgacgatatcggaagcctgttcaaggttgagcgacatttcaataatctccgcccagcgacgcgactcttcttctgccagttcctcttttggcatccgcgccagatacagcttaatggcggtatagagaacgttgatatcatctgccagcttacgcagctctttctcctgccgtggctcgccgtgcatcactttattcagcccttccatcatctgttccatggcgtcgccaatgcgcagggtttcgcgcgcggcgttcgccagagcaagcgtgggcgtatccagcgcgctgacatccagatgtttaggccgtagctgggtatccagttccggttcatcgcgaataatcgttttgcaaaaccgtgccatcgggtcaacaaatggcagcatgaccaggcaacgtacaaggttgtagaagacgtggaaatagatcaccagttccgcttttggcaatgacagcttccccattgtctctgccagcaaatggacaaacggcaggataatcaggctacccaccagcttaaacagcagactacccagcgcgacacggcgggctgcggcattggcggcactgttgttgagcatcgccagcaggccggaaccgaggttagcaccaatcaccagacagagcgccacggggaaggagataatgcctgcggcggtcagagtcgcagtcagcagtacagcagcaaggctggagtagctgataatggcgaacatcgcgccaatcagcgcatccagcagaatatcgccggtcagcgaggcaaagatcacctgaacgccgtttgcctgggtgatcggcgttacggcctgcacaatcaactccagcgccagtaaaatcagcccaagaccaataccgacgcggcccagttgcccggcgcgtgactgtttgcgtccgaggaaaaaaatcacgccgataaaaataagtaacggtgacagccaggataagtcgaaggtgagaatacgcgccattagcgccgtcccgacatctgcccccagcacaatgaccagagccggtgcgagggctaccagatcctgagcgacaaacgaggtcaccagcatggtggtggcattactgctctgcaccagtgcggtaacgccgatccccgcgcaaaaggcgagcggctttttttcgacgctccggctaaggacagtacgcaaacgcgcgccgaagacgcgcattacgccggttcgaacaatatgagtcccccagaccagcagggcgacggcagaaagcaggtgaagcagcgttaacacgagttcaggttctccttatcgttatatgttcctgaagcaattgaatgaccaaaggaccggaaacacgctgactggcatctttactgtgccttttgacattcgtttttccggctaagattattccagcctgtttccagtataagtgtttcatattaataaagagacagggcactcattgagcgccctgtttgttgtaaggaaaagtgacagatttgtgaatcagtccgcgtcataccccagattcggtgccagccagcgctcaacatcggagacgctcatacctttacggcgggcatagtcttcaacctgatcgcgctgaatttgcgccaccgcgtagtacttgctgtccgggtggctgaaataccaacccgaaaccgatgcaccgggccacatggcgaaagattctgtgagtttcatgccggtatgtttttccacttccagcagctcccagatggtggctttttccgtatgttccgggcaggccgggtagcccggtgccggacggatgccctggtagttttcgcggatcagttcttcgttgctgaggttctcgttcggcgcatagccccagtagactttacgcacacgctcatggagatactccgcaaaggcttcggctaaacggtcggcaagcgctttcaccatgattttgttgtaatcatcgtgctgcgcttcaaaggcatcagccagtgcgtcctcttccagcccgccagtcacggcaaatgcgccgatgtaatctgctttaccagaaagcttcggcgcaacgaagtcagcgagacagtagttagcgaatcccgttttttcggtctgttgacgcagatggtggctgacgttgatcacatgggtgcgcgtttcgtcacggtagatttcaatgtcatcgcccacacggtttgccgggaacaggcccaccacgccacgcggattcagcgttttctcggcgcttaatttatccagcatgtcgttggcgtctttaaacagccgctgcgcctcaacgcccaccacttcatcttccagaatgcgcggatacttcccggccagcgaccaggtcataaagaacggtgtccagtcgatgtaattacgcagagtttcgatgctggcttcaacttcctgcacgccgagacggtgcgccaccggcggcgtgtaagcctgccagtcaaaagcgaaatcgttatcgcgcgccgcttccagcgtgaccggtggtgtgcgcggtttcttacgcccgtgctgaatacgtacggtttcgtactccttgcgggtacgagcgacaaaatcatcacgctgagtatcggaaagcagcgccgccaccacaccaacggtgcgcgatgcgttctgtacatacaccgtcgggccgctgtagttctgctcaattttcaccgccgtgtgcgcttttgaggtcgtcgcgccgccaatcaatagcgggatggtgaagccctgacgctccatctctttcgccacgttaaccatctcgtccagcgacggcgtgataagccccgaaagtccaatcagatcagcattcacttctttagcggtacggagaattttttccgcaggcaccataacgccgagatcgacaatttcgtagttgttacattgcagcaccacaccaacgatatttttaccgatgtcgtggacgtcgcccttcacggtggcgatcaccatcttgccgttggttttgccctgctctttgctggcttcaataaacggttcgagatacgccaccgcctgtttcatgacgcgcgccgatttgaccacctgtggcaggaacattttcccttcgccaaacagatcgccgaccacgttcatgccgtccatcaacgggccttcaatcacttcaatcgggcgcgtagcctgctggcgggcttcttcggtatcctgctcgataaactcggtaatgcctttgaccagcgagtattccagacgtttattcacttcccacgagcgccactccgcctgctgggcgttagcggtgtcgtcggttttgctgccgcgatatttctcggcaagctccagtaaacgctcagtgccatcatcgcgacgattaagaatcacatcttccaccgcgtcgcgcagttcagcgggcaggtcgtcgtaaatcgccagctgcccggcattgacgatccccatatccatgccattgcgaatagcgtagtagaggaacactgcgtgaatggcttcgcgcaccggatcgttgccacggaacgagaaagaaacgttagatacgccgccggaaattagcgcgtgcggcagttcgcgtttgatgtcttcacacgcgccgataaagtcctgcgcgtagttgttgtgctcttcaatgccggtggcaaccgcgaagatgttcgggtcgaagatgatatcttctggcgggaagccaacctcttcggtgaggattttgtacgcccgacggcaaatctcgattttccgtgcgcgggtatcggcctgtccctgttcgtcaaaggccattaccaccactgccgcaccgtaacgacgcaagagcttcgcgtgatggataaaggcgtcgacgccctctttcatcgagatagagttaacaatgcctttgccctggatacacttcagacctttttcaatgacatcccattttgaggagtcgatcataatcggcacgcgagcgatatccggttcaccggcaatcagattgagaaaacgcaccatcgccgcttcggcgtcgagcatcccttcatccatgttgatatcgataatctgcgcaccgttttccacctgctggcgggccacatccagtgcctcgctgtatttctcttctttgatcaggcgcttgaacttagcggaaccggtgacgttggtgcgttcacccacgttcacaaacaggctatcttcgccaatgttcagcggctccaggccggacaaacggcaggctacggggatttccggcagtttgcgcggcgctaatccttctactgcacgactcatcgctgcaatatgttgtggcgtggtgccacagcagccgccgacgatattgagaaaacccgcttgcgcccattcacgtatctgttttgccatcgtgtcggcgtcgagatcgtactcaccaaaggcgttgggtagcccggcgttcgggtgcgcggtgacgtagcattccgcaatccgtgacagctcctgcacgtactggcgcagttcatcgggccccagcgcacagttcaggccaaaggtcagagcttcggcgtggcgcaatgagttgtaaaatgcttcggtggtctgcccggagagcgtgcgcccggaggcgtcggtgatggtgccggagatcataatcggcagctcaacgcccagcgcttcaaactccgttttcaccgcaaaaaccgccgctttggcgttaagggtgtcgaaaacggtttcaatcaggatcagatccgcaccaccttccaccagcgctttggtggattcgcgataggccgccaccagctggtcaaaagtgatgttgcggaatgccggatcgttgacgtccggagaaatagacgccgtgcggttggttgggccgagaacaccggcaacgtagcgcggtttctccggcgtgcgcgcggtccactcgtcagcacaggcgcgcgccagtttcgccgccgcaaagttgatttccgccgacagggattccatctggtaatccgccatcgcaatggtcgtggagttgaaggtgttggtttcgatgatatccgcgcccgcttcaaagtaggcgttgtggatagcggcgatcacttccggtttgctgagcaccagcaggtcgttgttgcctttgagatcgcatggccagtcggcaaagcgttcaccacgaaaatcggcttcgttcagtcgatagctctggatcatggtgcccataccgccgtccagcaccagaatacgttcatttaactgcgcacgcagttgttccactttgctgctcacacttgctcccgacacgctcaacccagatttaataaaaattcaacaaaccatactggcataaacgcatctgtggtaaaagcgaccaccacgcaacatgagatttgttcaacattaactcatcggatcagttcagcaactattgcattagctaacaataaaaatgaaaatgatttccacgatacagaaaaaggaggctgtcatggtcgcacccattcccgcgaaacgcggcagaaaacccgccgttgccaccgcaccagcgactggacaggttcagtctttaacgcgtggcctgaaattactggagtggattgccgaatccaatggcagtgtggcactcacagagctggcgcaacaagccgggttacccaattccacgacccaccgcctgctaaccacgatgcaacagcagggtttcgtgcgtcaggtcggcgaactgggacattgggcaatcggcgcacatgcctttatggtcggcagcagctttctccagagccgtaatttgttagcgattgttcaccctatcctgcgcaatttaatggaagagtctggcgaaacggtcaatatggcggtgcttgatcaaagcgatcacgaagcgattattatcgaccaggtacagtgtacgcatctgatgcgaatgtccgcgcctatcggcggtaaattgccgatgcacgcttccggtgcgggtaaagcctttttagcccaactgagcgaagaacaggtgacgaagctgctgcaccgcaaagggttacatgcctatacccacgcaacgctggtgtctcctgtgcatttaaaagaagatctcgcccaaacgcgcaaacggggttattcatttgacgatgaggaacatgcactggggctacgttgccttgcagcgtgtattttcgatgagcaccgcgaaccgtttgccgcaatttcaatttccggaccgatttcacgtattaccgatgaccgcgtgaccgagtttggcgcgatggtgattaaagcggcgaaggaagtgacgctggcgtacggtggaatgcgctgactttttctggcgggcagaggcaatattctgcccatcatacctgagtggcaatagaataagggtgtctgttaatcgcattgacgccaaaataacttaatgtcatacacttcacacacttttattaactcagcattatttttaaacatcaaactactta

SEQ ID NO: 268 - DNA, 15036 bp, Escherichia coli
  source 1..15036: mol_type = genomic DNA
acatctccgaaaatgtgtagggtagcggtggcggcaaactccttttgccgccgtagttgttatttgttatggaaataaccatcttcgatggtgactttgagaaccacttttttgaccgcgttattgcagataaaccgatacgcttcatggatatcgcaaataacgatttgcccttcgtggacctcaacggtttctccgcagccttttaaatattcacggtcagtttcatcacgataatattccactacctgtaatgtctctttcggcgcatattcaattttttgctgcccttgcaggtagtaatgcacttcaaaatagcgtcgatgcccggtaaatagcgcatcggtcgcggagtctgtctccacgcggtaagtcaatgagtcaccgatggagtgggcgacgccaggctgaatgttgtcgatattttcaatcgcttcaacgcagcgttgccacttcttgccagaggcgtaaatctggcggaactgttctaagttatcgatgatcctcattgcttattctcgctgtgcaaattcgtggaaaagaaccctgcgccgaactcatacgacgccaggctttgcgcggtagcttctccgccagaaaccggcagcaacgtaaagccgtagctgaagtcacggaaccagacgcgccaggagtccagcacctcgctgccccaggagttggagccgaggccaagcagctggtgatcgaggttcagggtgatgtcatcactgcgctgcagctcgttacagtgctgggcagcgtggatgttttcctgggtatagtgccaggcgctgaagttaattgggcgctgcggaaccaccagcaaaccgttgccgtggcggttagtcagtgccgtccagcggacatgctgacggttgccgttgttctgcgggaagggatagttctcgaacatggcatcgacggtgctgcgccagatatcgatgatgttagcctgctggctgtcggcgtagttttcgcccggtccacgaccgtaatacgccacctgatcgtattcgccgttaatccccatggtgaaaccgatgcacggaatgatgtgcggatagtcgccgtaacgctcgccggaaagcgccacgttaacctggccatcggcagcgatgcgccagatgtaggtgcagcgcatcccgaagtcaaacaccggcggggcaataactgtgcggctgatgatcaacacttcaccatcgctctgttctacggcaaagtcgcgcagatgttcctgcatgatctgcaaatgattcggttgccacagcccttcgtactcctgcttgtggttgtcgatcattggcttgaagaagttgatctttggctcgcgggtcagcagcgactcgccattcacctgccaggatgtcggtttgccactcatttttgagaaggtgatcgcgaagttgtagccgcgaacggtgcagctcaaacgatcgtcttccagcgtcagcggacgcgcattatttggtgcgaaaggcactggttgcgcggtgttttccttcagcgggaactgataagtggcgatagaatgcccggcttcgctgtagcgggtgcgggaatctttggtcaccgtaatgttgaggaactcttcgcgggcgtccagctgcggcagcgtgatctgcaagggggcttcgctgttcggcgcaacgtcgcgcagtttaatctgctgcgtcgcgagcgtttcaccttcggcgcgcacctctgcgtgcagggtgtagtcatcaagcgtggtaaaccacagtttattttcgactttcagctcgccgcgagtcagatccagcgcgtggatttttaccggcgcgataacctgtttgtactctttcaggcctggtcccggcgtctgatcggaatagatcaaaccatcaagacagaagttatagttgttgggatagtcgccgtagtcgccgccgaatttataccagacattgccgttgtcatcctgcgcctggatcccgtggtcgcaccactcccaaacataatgtccctgaatacaatcgtgcttatagaagacgttctggtactccgtcagcccgcccggtccgttccccatcgcatgagcatattcacagatgatgcgcggcttcggatgcgggtattcaccaaactcattcatcagcggcacgcgggtgtacatggtggaaataatatcgaccacttcagcatcgcgatcttcttcgtaatgcaccagtcgcgtgtcatccagcgccttcgctgcgtggtacatcgcgcggatgttacagccatagccggattcattgcccagcgaccagatgatgatcgacggatggtttttctgcgcgtgaatatggcgaataatgcgctcgacgtagactttttcccactgcggatcgtcggtaatacggctgatatcgccgacattagcaaagccgtgcgattcgacgtcggtttccgccatcacaaacaagccgtagatatcacacagttcgtaaaaacgcggatcgttcgggtagtgagcggtacgcacggagttgatgttgtgctgcttcatcaactggagatctttctcgacgcgatccattccaacggcgcggcctttgcgatgatcgttgtcgtgacggttgacgccgtgcagcatcacataacggttattgatccagaacagaccgtcgcgcactttgatatcacggaagccaacgcgttgtggtaccacttccagaacgttgccgttggcgtctttcagcgtcatgaccagatggtaaagataaggggattctgctgaccattgctgcggctgttcgacagtaaaagcaaagctggcgctggtcagtttttcaattgccaaatgatcaatggcgctgctgtgcaccacgcgttcgccatcaaacagggtatattccagcgtcgtgacgacaggggaggcggagatattttccagcaccacttcgcaggaaagcgtggcatcgcaataggcttcgtcaaagtcggtacgaacggtgaaatcgttaatatgtgttagttgttttccgatcagataaacatcgcggaagatccccgctgaccaccacatatcctggtcttccacgtaggtagagtccgcccattgcatcacgcgcacacacaacaggttgtcgccggttttaaccatcgcgctgatgtcaaactctgcggtcaggcgactgcccttgctgaaacccacatactgaccgttaacgtagacttcaaaataggtttcgacgccgtcaaatttaatcagcgtctgtttaccctgccagccgtcgctgagggtgaaaatacgttgataggcaccggttgggttatcgctggggacaaacggcacatcgatggggaacggaaaaccttcgtcggtatattgcagtttgccgtgaccttccatttgccacatggcggggacggtaatatgcccccagtcagccattaactcagaggtgaaggcttcaggcacttgcagcggatggtcaaaaaagtggaaattccactggccgcttaagggcagaaacaggctgctggtttcgcgggcaaaggtacgcgcttgcgcaacagaatcatatgaaaaaaagtacgcacgtggcgcaagtcggttttcgtgggtgagctgaatgttttcccagcgattcatagggcctcccggtagagagaaatcggaaccattcatggtgatggtagtttgtgtaattgctggggagtttagtaaaatttttactaaaaagtagcgggtaaatgcatttactttaactggatcacgaaaataaacggcagcactgtccggcaaaaacgattgccggacagcgtgcaaggggatttaacgggtcgtgccgcgcagttttaatttgctgggaacgaagaccaacagcggcagcgcgcgaccatcgcgggctttttcatacaccaggttaacgccctgacttcccatcatctcggaatggatgcgcacggtggagagcggcggaaaggtaaatcgcgcggtggggatatcgttaacgctgataagcgaaatatcctgtgggatgttcaggccacgttcatgaattgcccgcagtacgccgatagcaatggaatcagaagcaacaaacagtgccttcggatagtcttcctgcgccagcagctgttttgccagttcatagcccgacgaactggaaaagcctccgcgccagatatcctcttcgcgtaccacttgtttcagtcggccatattccgcaaaggcgacctcacgaatatccgctttgcctggctcatcttcaccgccaataaaaccaatacgattaacgccctgattgatatagaagtcgatgatttctttactgatgcgtgccagatcgatatccaccgcatcgtaaccgctgccgggttcgtgaaagtcgataaaacagatattgtcggtcaacgcacaggcggcggcgcgcagggcgggcgtgggtttgccgacaattaaaataccggtgacgtttttaatgtctggtaatccgctgtgttcataacagttggtgagctcaatgcccagcttttcgcactgagtttcaatgccgtggcggatcgccagatagtaaggatcgttgatctccagctcctgttggtagctgtagatagccagaatatggtgttggttgactgcgcctgtctggagtttacgggcactactggtcttgtactccagcttttcggcgatctcgagaatgcgatgtttcgtctcttctttcacattcaatgtcggatcgtcatttaagaccctggatactgtcgccagggatacgccagcttcgattgcgatgtcttttagtgttgccatgtttaccttttttactttccctgatgtgcgcccccattgtagaggaagtgcttatcgggtcacctgttttcagtaaataaagcgcgtttctttgacgctgtaacggtaacacagcggctcacgaatgtgatcacgcctgcattctccatttttatcctacaggattgagaaaaacttttgctatagtttagtaaaattttacttgaagggaggaagcaatggaaaccgtggcttacgctgattttgcacgtctggaaatgcgcgtcggaaagattgtggaagtgaaacgccatgaaaacgccgacaagctgtacatcgtacaggttgatgtgggggaaaaaacactgcaaaccgtgaccagcctggtgccgtactacagcgaagaagagctgatggggaaaacggtggtggtcttatgcaatctgcaaaaagcgaaaatgcgtggtgaaacgtcggaatgcatgctgttgtgtgcggaaaccgatgacggcagtgaaagcgtgttgttaacgccggagcggatgatgcctgcgggcgtacgcgtcgtataaaaagatcggatggcgacgtcgtatcgccatccgatttgatattacgcttcttcgacacttactcgcatggccgccagcgccttacgcgccgctttgatcaccagttcacactgttcaatggtcagtgtcagtggcggttcaatgcggatcgttttggcgttattgagcgttccggccaccagtacgcgctggcggaacatctcgctggcaaagttatagccgatttcgttatcaacaaactcaattgccatcaacatccctttaccacgcgcttcctgtaccagatcgggatattcccgcgccagttgacggaaaccgtccagcaacatatcgcctttttgctcagcctgagccggtaagttctgctccagcaacacattgatggtcgccagcgccgccgcacaggccagcgggttgccgccaaaggtggtggtatgcaggaatgggttgtcgaacagaactgaaaacacctcttcagtggcgatggtcgcgccaatcggcatcacgccgccgccgagcgctttggcaaggcagaggatatccggctgtacgttctcatgctcgcaggcgaacatcttgcccgtgcgccccatgcccgtttgtacttcatcgaggatcatcagtgcgccgaactcatcgcatagcttacgtacggcggtgagatagcccggcggcggcagaattacgccaccttcaccctgaatcggttcgaggatcaccgcagccacatcatcaccggtttttttgcactcgttaagagccgtgcgcatggcttcgatattgccaaacggcacatgacggaagcccggcagtaacggcataaacggtttgcggaaggtcgatttcgccgtggccgacagcgcgccaagtgatttaccgtggaacgcgccgctggtggcaataaaagtaaacttgccgcgcggtgactggtaagctttcgccagcttcagcgctgcttcaacggactcggtgccgctattacagaagaagctgtatttcagtttaccgggcgttagcgcagcaagggttttcgccaacatcgcccgtaacggatcgagcagctcctggctgtgcagcggttgtttcgcaagttgattctgtacggcggaaaccacaactggattacggtgccccacgttgaaaattccaaaacctcccaggcagtcgataaactcctgtccctgggtgtcgacaagcgtatttaaacctcccgcttgccactctacggctccgtaatccccgccggcggtaacagatttgcgatactctaaaaaccccggattgacatgctctttgaagtattcaatcacctctcggttaagtgctttcatctcctcatgatccagcgttcgcttctcaatgagattcagggcgtgggcgctgcacgctaaagccgatgcgctcgaaggtaacctgttcaaaatatgctccggaggctcgcgtatcacatgataccgatttaagtattgcagggattgcgccactccggctgcgatcgcgaaaatcgggataaacacaaatgtggttatcatttgcgcaatatttaatgctatttgttaacatctgttgttatttcgcacggtttttgtcgggtatggatttgatgattgctgcgcaaatgcacgttttcagggcaataattgcctgatttttgggcaagataattaacgttttcgtatagtaacagagtgaaagtattttaaatcaaagaattagatttgtgctttaatcgcaaattgcgatctaaatcaaattaatcggttaaagataaccgcagcggggccgacataaactctgacaagaagttaacaaccatataacctgcacaggacgcgaacatgtcttctcatccgtatgtcacccagcaaaataccccgctggcgggcgataccactctgatgtccactaccgatctgcaaagctatatcactcatgctaatgacacttttgtgcaggtgagcggctttaccttgcaagagttacaagggcagccgcacaacatggtgcgtcacccggatatgccaaaagcggcgtttgcggatatgtggttcaccctgaaaaaaggggagccctggagcggcatcgtgaaaaatcgccgcaaaaatggtgaccattattgggtgcgggccaatgcggtaccgatggtgcgcgagggaaaaatcagtggctatatgtcgattcgtacccgggcgacggatgaagagatcgcggcggtggagccgctgtacaaagcgctgaacgccggacgtaccggtaagcgtattcataaaggcctggtggtgcgtaaaggctggctgggtaaactgccttcattaccgcttcgctggcgggcgcgtggagtgatgaccctgatgtttatcttgctggcggccatgctttggtttgttgctgccccggtggtgacgtatatcctctgtgcgttagtgatgttgttggcaagcgcctgttttgaatggcagattgtccgcccgatagaaaatgtcgcccgtcaggcactgaaggtggcgaccggagagcgtaatagtgttgagcatctgaatcgcagcgatgagctggggctgacattacgcgcggttgggcagcttggcctgatgtgccgttggctaattaacgatgtctcaagccaggtgtccagtgtcagaaatggcagtgagacgctggcgaaaggcaccgatgaactgaacgaacatacccagcagacagttgataacgttcagcaaacggtggcgaccatgaaccaaatggcggcgtcggtgaaacagaactctgccacggcgtcggctgccgataaactttctatcaccgccagtaatgcggcagtgcagggcggggaggcgatgactacggtgatcaagacaatggacgatattgccgacagtacccagcgcattggcaccattacttcgctgattaacgatattgcgtttcagaccaatattctggccctgaatgcggcggtggaagcggcgcgtgccggcgaacagggcaaaggttttgcagtggtggcgggggaagtgcgtcatttagccagccgcagcgctaatgctgccaacgatattcgcaagctgattgatgccagtgctgataaggtgcaatccggttcgcagcaggtacatgccgccggacggacgatggaagatattgtggcacaggtgaaaaacgtcacccagttgatcgcccagattagccattcaacgctggaacaggccgatgggctttccagcctgacccgtgcagtggatgagcttaacctgatcacccagaaaaatgccgagctggtggaagagagtgcgcaggtgtcggcgatggtgaaacaccgcgccagccgactggaagacgcggtgacggtgctgcattaatcggtacgccggatccggctgttggagcacaatgcctgatgcgatgctggcgcatcttatcaggcctacggggtgtgtagcgggtgtaggccggataaggcgcgtcaagcgtcgcatccggcaattgcaccgcgccactggcggatgcggcgattaatccagttgcgtaatatcaaaagcggcgcggtcgatcaccgcaatgatcttttttatttgtgcatcagtgatatcgctctggttgacgcgtaaatccagcaccgctttaaaattatccagcgcccgcttcatttgcgggttctggcgcagcgccgcgccaacgcaacgcgctttgatgcgttcttcaatcatctccacctgttcgcggttttcttccagccactgcgcgccttgttcggtcagtgcaatctgcttcttaccaccttcctcttcgcggatggtaatcagcgactgctcctgcagaaaatccagcgtcgggtagatgacgcccgggcttggggtgtaattcccctgggttagattctcaatcgctttaatcaattcgtaaccgtggctgtcatcgcgcgagagaatatccagaatcaccagacgcaattcaccgtgaccaaagaannnnnnnnnnccgccgccgcgaccgtggcgaccaccgcagcattgaccgtgttcatgctggtgaccgtgtccgcagtgctcgtgttctgacttctcacctttgcagcagccctcatggcgtggctggccttcatgtttacaacacccttcgtgatgatggctcatatcagcctccttttgcttgattagatatatctaatttatatctgatataagtattactgcaagtacaaaaatgatttttaaacgcaggtttactcaacatgtaggccggataaggcgttcacgccgcatccggcattgagcaatgatgcttgataagaggttgcgcgtcttatcagactacagatatatcagttctacaaatcgcttgcatttatcatgattaacaatcattatcatttgcgagttttatttagatatatctaattaccatcacgaaggcgataacaatgaataactccccccgctacccgcagcgcgttcgcaatgatctgcgcttccgtgaactgactgtgttacgcgttgagcgcatcagcgccggttttcagcgcattgtcctcggcggcgaggcgctggacggttttacatcgcgtggctttgacgatcacagcaaactcttctttcctcaacctgacgctcactttgtgccgccaacggtaacggaagagggcatcgtctggccggaaggaccacgcccaccgtcgcgtgactatacgccgctgtatgacgaactacgccatgaactggtgattgatttctttattcacgacggtggggtcgccagcggctgggcgatgcaggcgcaaccgggcgataaacttacggtggcaggtccgcgcggttcgctggtggtgccggaagattacgcgtatcagctgtatgtctgcgatgaatccggaatgcccgcattgcgccgccgcctggaaatgttgagcaaacttgccgttaaaccgcaagttagtgcgctggttagcgtgcgggataacgcctgtcaggattatctcgcgcaccttgatggttttaatatcgaatggctggcacatgatgagcaggcggtagatgcgcgtctggcgcagatgcaaatccctgccgatgattacttcatctggataaccggcgaaggtaaagtcgttaagaatttaagccgccgctttgaagcggaacagtatgacccacagcgggtacgtgcagcggcttactggcacgcaaagtaactgatatataaaaagaaaaaggctgacgatttctcgtcagcctttgctatatctggtggcccctgctggacttgaaccagcgaccaagcgattatgagtcatgaggcaagttcgttctatattgtttttgtttgttcgtgattgctttattagttgtttataatcaatgaattatgtaattttctctgtctccgcttggttccgttttttcttcattgtacgatcgttacctgacccattacctgacccaaaatcacgagttattctgattgttactggtttagaaaagaggttctatggccgtcaatcttactgaaacagccatccgagcattgaaagcaaaaaagacatcgttctatgtctggagcaacagctctcaacgtggcactggacgacttggtgtcaaagttcagtcttctggcagcaagattttctatttccgctattacgtggaaaaagggaaaaaagaaagattcattcaattgggtatatggcctgagatgaaactggccacagcgaatgaactggcaaaaaagtatggtgcctggctcattgaaggaaaggatccccaggcagaactggaacgacaacagtttgcagaacagcagcggatacaactccatcaatcacagggctcatttgaagcattgattcatggttatgttaacaaaatgaaaattgataataagaggacatggcaggatgttctgaaacgccttgaaaatgaatgctatacagtgatcccccgtgaaactaaagctaaagatgtgacttccggacagattaaacatatcctggccgggatcattcagcgtggtgctgtggttcactctaaccggatccgttcttacctgatggctgcatttaactatggactgaaagcagataacgatccgatgaacacaagtgcagggattacttttgggctggaggcaaatccggtgtcagtgataccgaaacagtcatctgctgaaaaagtcggtgatacctggctgacacttgaagagttgcgttttctaatggaacattttgctgaagcaaccaacgttggattattgatgcaacatttgatccgattctgtatctataccggagggcaacgtcccttcgaaatgatcgccagtcagtggtgtgatgttgattttcaacaaaaaacgctgctggtgactgctgatgtctctaaaaataaacgagagcatttgataccgttgactgaatcagcattacaggaattatcctgtgtgcaggagttaacaaaagaaaaatccagcccttacatttttccactttcgactaatggtaagcgtccggttcgtacggacagtctggctcgcgctatcatgtatttccgggcttttaatcctgactttaaaatttttacagcacgtgacttacgtcggacctgtaaaacgttaatgggagaagctgggatcagtaaggaaatccgcgatcgtattcaaaatcatgcgttgaacgatgtcagttcaaaacattatgatcgatacgattatttgccagaaaaacgcagagcacttgagatctgggaggaccgggttaataactatcaacagcaaacaggcaataatgttgtcaatctgtttggcagaaggtgagggagttcctggtcgctgtacgaattgtgtacaattgatgagtattgttgatgcacttggttcttgtattgtttactataattattgaggtaaattttcgtgccggtattactcagaggggattcaaaaatggctgtaattccaatgtcttactcccctgctactgtagctcgtcgtttttcgatactggatggagtaactattcagggcgtgctttaccagatcatctgggatccaaagactccgtttgctgcggtaatcgaagctgcaccttctgttattgatggtgatgttcgccataaggttgttgccactctggagcttcagcgtcgtccccggcttgaaggcgtgtttgtccagaaattctgggaagaacaggatgttgctcagattgaagggattgttgtcgatggcgctgtacgtgatgttggtcttgcaacgtttgtttatgaaacgatagtcacaaaagcgggcgttgtactattaagtgataacgagcaatatgaaggaggtaaagctctctggcagcatattgcgcgtcgttcaacgaatctgaaggtgtttattttagatactgattccgcacggtattacccgtttgatggcgaacggatcagttatgacgggaaaagcatcccggaatcagaaatctggagtgaacatcctgagcgaaacagacacgctgtcgttcttgtggctgaatctgttaatggtaaagccgcataatttgccgagtatctcgttttttgagatcttgctggaaagtctcccttggggatagcgaactgctatcccctttctcagtgagttactgttcgaccagacattttccccataaaggtcgtatcgagtatctatcttcgctatatggatttattttatttttttccctctgtgctatcagcaacgtgtcgatctcatccttaataatgtgttgaactgcttgacggtaacggttaagcgaagtgtcactgatatcttgtggaagttgtagactgccatctgccttgacgagttcattcacaccatctttaattttgcgtccctgaccatcaggtataccttcattcagatcatagcctttcagtcctgcaagacgaatattcacgtcaatcttttctgtacgtttctttttgttacttaccaacagaattttattggcgttataccatttttcaaatgtttccagttgtttcatgatgtttgtgaagttattcagttcgctcctgaattcaatagattttctaatttcacgctcttttgcatcaatgtttattcctggataatttatttccctttttaacggttctatgtatgcctgttgcaggcaaccagcaagattcattgctgcatcctgcagggtattggtataaatcagtttcagaagttcatcgcgctgtatagtgatttgacaatagtctttttcccatgcggtggtgttttcaatcgtgtcactttcatcggaaataattgttgtgaatttccaggtgtaacgaataaaatcatttcctttaaaatattgcactaatttatttaaccattcatatatttccagagcataaagtttaacgtatccatcatatattatctttgttgcatttttgttggctagcgaaaacattttgtccacgaattctgtacgcccgattgttagcaattgttttctaagtttactcacatcgttagtatctggtttctcacaattccagggacttttgtattcattttcaaaaggagaaagccattcaggaatctctgtttctgagtgatagcagttgttaatagccaaaccaagggttctggcaagtatcgctgattcatcaatttgatggtatcggttcagttgttccagtaattctttagtacatgagtgcgcaacagaaagatcttgatggcaatatccttgtcgaaccagagcgggaagtggtgagcaatgagctttgcaatctgtcagaatattgaacaaatcgtttctgacgaattcttccatctcaggtgttttccagccaccactattttggccgacaaattttgctgttggttccctgttcatatctccccaggttttcaggctgacgagtctgttatcaaaaccattgtataaatggcacataacctgaaaagcagcatacagctctttagatagtggattatcggtctcacctatggagtagtcctctctattttgctctaaaatattttgtagttttgtgttagcgcgtaatgccgagagaatccgatgttgttcatcaaaccagggacgatattctggatccagatacaatctgcgtgctttgaaaatgagtagaagcaactgttcggaaacagcttcatgtatgtggggaaacggcatggaggtgccagataaaacacgatagtacgggtggtttgtttttacctttttagttaccataatgttaaattcttccgtctattgcatagctgtttccagtagagaaacttgatacagtcctttgtcaggacattgatacagagttaacagcctctacgaaatgggaatcagttatgcagtggctacgatgctgaatctaatacgatatccttagcgtttattcctgatttttttacgagcattcccttttgttgcatattgctcaggacgtaaatgattttacggttatagccctctacagtcacgtcactttcatctgaaaatatgtatcgttttcattcaattattatcttttgtctgcactttagctttagcaagttggcaaaaatcaactccctcttacaagttctattatcgccagaagataattttgtgaacttcgtcacgttttcaaactaatgttgtgggggcttttctggggaaaatttttggtcactacccctcctcttgatatcatagatcataacaagattttttatgtttttgtctgcataaaataacctacgaag

SEQ ID NO: 269 - DNA, 14966 bp, Escherichia coli
  source 1..14966: mol_type = genomic DNA
atagtgcgctgggttatcgctcgccacgggaatatctgcggcagcgggcttgtaatgggttaagtgataacagatgtctggaaatataggggcaaatccagtcacttacatccatccattgatagatcattagcgtcctggcattaccccaattctcccaaaaacggcaaaccagtcctcagcccgcaccatgactggtttaagacgggatccctgcggcaaaatgcgcctttacgtatttggttttacccgcaataatgcgtgataatcaaacaaaaggatccgcgcgctgcgatttattgtcgtggaaggatccgggcgttcaggtcagaatgcctgtatccataaacagtgcgtgtgctacgtgaaaaataactcatgaacaatgtcattcccctgcagaattcaccagaacgcgtctccctgttacccattgcgccgggggtggattttgcaacagcgctctccctgagaagaatggccacttccacgggggccacaccggcctacctgctggccccggaagtgagtgcccttcttttctatatgccagatcagcgtcaccatatgctgttcgccaccctctggaataccggaatgcgtattggtgaagcccggatgctgacgccggaatcatttgacctggatggagtaagaccgtttgtgcggatcctgtccgaaaaagtgcgtgcgcgacgcggacgcccgccaaaagatgaagtgcgcctggttccgctgacagatataagctatgtcaggcagatggaaagctggataatcaccacccggccccgtcgtcgtgaaccattatgggccgtgaccgacgaaaccatgcgcaactggctgaagcaggctgtcagacgggccgaagctgacggggtacacttttcgattccggtgacaccacacaccttccggcacagctatatcatgcacatgctttatcaccgccagccccggaaggttattcaggcgctggccggtcacaaggatccgcgctcgatggaggtgtatacgcgggtgttcgcgctggacatggccgccacactggctgtgccgttcaccggtgacgggcatgatgccgcgcagatcctgcggacactcccccctctgacgtgacaacgtcactcattacagtttatataagctgtggtgagtaaactctacctgagataagctgtagtgagcagaacactcaccagaggctgtaatataagctgtagtaagtaaaccgggacagattactcactacagcttatgttcagcgggatttgaagagtttttccaggtcatcaagggtgatgcccagtttctcgaggagcttcagtttttcagccatttccgggctgacatcacccgttgtggctggcagctgcgggttctccgcactctcatcatgaggtggctttaacttgggccggcggtaatgaatgcagaagagtttggtgcgtccccgctggatctcagtgtaatccaggtagccaatctcccgtagctgctccatggcacgcctcaccgtctggttctgtgagaacacaggggatttcaggttaagacgggcccgcagacgcgccagagatatcggcgccggatcccgtggcagactctctataaaggtatacagggcctgcgcagactcccggcgcttcagggcattgatggccttgagttgcagcagcactttccggtcaaactggtagagctcaaacaggcgtggatcggcctgcagctggacgatatccttttccgtatcatagtaagccgactgcaccagatgtgtgatgtactctttggtgttcttttccgttgtgcgggaaaatgagatcacggtacccgcgatacgtttgagtgaggggcttatacgttcacgaagcttacgtgatgactgactggaggggatcccgcagagtttggcgaactcgacaaacggcagctcaactttatcgccgataaccttatggcgggcaaaggaatgaatcacccctacccaggtcttgaagtcattatccatatccagacgcgggccggtgatctccaccttatcaaaaccttcggctctggcgagagacaggcgcgtcagttcttccgtcgcatcagtccgggaaagcgtgttttttttgctgttcttcagtgatttaagcgtgggaacaaacaccccaagccgcatcagtgccacaggctgcactgtattactggcattaggtgtaagatttacgacttcaccggaggatttatccacctcttcaaacagcttttttatgtccagattgtccttgtccagatagcctccgctcggtggatagtttaagaataaaagcagccactcttttcattagatggcctgtaaagcgccagacaactggcttcagtttatacacaaccctgatgaactttcagggggcatactcactgtagtttatatcactcgctcattacagtatatcctctgcataacacagcttattgtataccagttacagtttatgatttacttgctacagcttatgtgatcatgctccaggctcagtgctggcgcgaccttccgagatgtcgggatcttctttggatcttacagggatcgctttaaggatcttattactggatcgaatgaatgtatatgtggataacctgctgagcagcaaggcaattcagatagttcttcagtgatcacttgccgcgactacagtgcgtacctgcttccttcagcttctgtgttattgcgcttcctcgccggttcgcgggctttagcccggtcaccggactgcggcgagcactgatggttcagccctcaatgtagagtatgccgtacctgaattgctcgcagatccataatacggtggttacgtagtgcagtttaataatgacttcttaagatcagacccgccaaagatagtctgagcctgctcagattagcgtcgtgagtcttctcactatacctttacgtgctatacccggattcataaccaacttgtggttgaaacctgcataccataactctattatgtttgtacggtatttttccgtactcactatcaaagtatcaccatgaccggcctggataaatgttatcgccttaaggcccgaacttaacaaagctgaccgttctttcagaattaagagtggtcagggagaaaaaccatgtcagcactgaagaagcagcgcatcgatctgagattaaatgaagacgacaaacacatgatcgaagaagctgcagcaatgactaaccagtccatttcgcagttcatggtcagtaccgcctcagcacgtgctgctgaagttattgatcagcaccgtcgcctgctcctcaatgaggagtcctggaatctggttatggatgcaatcactaatccgccagcaccaaatgaccggctgaaacgcgccactaaccgtctccgggaactggagtaataaatggacggtttaaggattgagattttttcagaggaagttgaatatcaattaagcaacttcgattgtggagaagagtatctgaatacttttctcaccgatcatctgcaacgtcagcacagtagtaagattttacggggttatctgctcgtgacgagagaggatagaccacgtgtcatggggtactacaccctgtcaggcagttgctttgagaaaatacttctccccagcaaaacacaacaaaagcgtgtgccctacaaaaatgtgccgagcgtgactttgggccgtctggcaattgataaaagcattcatcaccagggatatggagaaacacttgttacccatgcgatgaaagtcgtgtatcaggcctcgcaggctgtgggtatacacggaatgttcgtggaggcgctgaacgataacgccaaaaaattctaccttcgactgggttttatacagttaaaggaagaaaactgtaattcgctcttctacccgacaaaatctattgaagtattgttcgaagtaaatgacgaataaaaatcagatttaaaccgttcgatactggatcagggctggtatgaaatgcgctgccagcttgagtataagcagctctggcgtggtggtcaggtgctggctgtggtcatacagcgaatgccgatgtaaacggcgctcgtaacattttagcggcggggcatgccgtgcttgcgtgtggaggattggggcagtcaggccgcctgtttaagccggaacccacgtccttcagagtgtgggcgatgttaatttacccagtcttccagcttcaggcccggcaattgtcaacgactccggcattgccatcccctctgaccacgctttcagaagcagctgccgcatattccacatccaccgtgaacgcatcgcgtctttcaggaagctcagctttttccactgaccatgcttattcagacctccacaggttacagacacatgtacatgcggatgccagttgagacgacggccatacgtgtggatggcgcagaagataccgggttccagcccccgttttcgggcggcatacagcagattctccaccgccagacggcacacgtcattcagcagtcaacggttgctttcgaacaccggccacagcgtgtccggcagggtgaagaccaggtgtacccagtcgcagtcaggaagacgattcagctgtgtcgctatccacaggtctgtggccttctttccgcaggacgggcaggcacggctgccgcatgagttagtgacgtatctgacgtgggggcagtcaggtttatcgcagttgtattccttcacgcccagtatccgcgtgccgcaggccagcattttggtgacagcctcaacctcgatatcgcgcagaccgcccgcatccagaaaggatgtccagcactggttggctgtgaacaggcgtttcagcggtcgggtctgaaaatcaccaccacttcgggtcatccgccttcatctccgcttctgtttcgtataaatcaaaacgacggcaggtatggcagaacgtgacgtattcgtacggtgaatccgggtacattttgtggaaggtttcccagaaacagaccgtgcaggagggatgaccggcgataaagtctgtaaatacggactgataagggtgattattggctctggcgacggctttcagaacctctttcaccattctggtgtggactttctggtgctccaggttgtgtgacatgggaactcattctggatggttactctgaaagctcatattctgccacaccccgatttgcagccgccaggctgccgtggtccgtcctgaaccgtggcggcaaaggcgtggctgatcaccagcagcaggcctgcaaaaagaaaacggataaatgccaacataaccgtaaacctgatggctcaggtgtcgtgtccctgaaaatcgactggatcatggagcgctaccagctacctcaaagttaccaacgtatgccggattttcgccggcgtttcctgcaggcaagtgttgatgagatcaatagccggacaccaatgcgcctctcttacatcgagaaaaagaaaggccgccagacgactcatatcgtattttccttccgtgatattacctcgatgacaacagaatagtttgagggttatctgtcacagattttaggatggttcgtcacatttgatccggcaggttgagggtgatttgtcacagttttgctgttccatccctggcagcctgcgcttactcatagttttttggctgtaaccggtagtgaaaccaagtttgagggcaatttgtcacaatacatgagggcagattgtcacacttgttgccctgaacaggctatccgtgtgtgcctatacttgtggtgtttcccgcagatcaggccgtccacgaagttgacctgtttcccacagaggatggaaaaatattcttgtgttgagcgtaagagctatctgcaggaacgatccctcttcgcttcctcgccagttcgctcgctacgctcggttacatggctgcggcgagcgctgcctgattctaacagcaacttttcagcatgatagctgcaataaaatagattgcttctatcatgctgtctgtagacgccgggacttatagtgacttagtttccagacaatcattttctggtggtatagcatagcgctcggctcatgttttgctgtgtgcatgcttgtggcaatcttgctgcatctgccaatgcaattctggatgagttttcttttattgttgctgcaagattgcataaagcttgcagcttttattattgttaacgtgacacaagtattcggctgtcaattccagcactcttctgaatagcaagattgaatcttgccgctagatttatgattgttgtaatcttgctgcaagctgatatcttgttctggaagagttattttacctaacctcaacctggtttatattgatgtttgctgcaagatagcagcaagtaaaggaggctaaatggcctggatagttggttttatttcccagaaaggtggtgtgggcaaaagcactaaagcgagagcgttagcgcgtgaagcatccgcctgtggcatcaaaacaaaattagctgatctcgacctggaacaggcaacgagtgctgagtggcatcgtcgacgtctgtcagctggtttgccaccggttgcttcagttgaagtgttttcaacagcaaagcaggcgatagaatctgccggcgattttgaccttctgattcttgatggcccagctcgtgcaagcaaagggacttcagaaattgctaaggtcgccgaccttatcgtccagccaacgggggcctcccttgacgatcttgtcccggccattaaagttttcaacgcgctggtaaaagaaggtgtgccacgttcaaaactggtctttgctttaagccgggtaggtaccgaagcggaagagctggatgctcgtgcatatatcagtgaagcaggttatgaaactttatctggatgcctttttgagaagccagcatacagaaaagcgatgaattcaggactcgcagtgacagaaacacgttataaaggtttaaacgagagagctgatgaacttatccaagcactcatcgataagattggagaagagtaatggctgatgcatcaaaacttaaaactaaaaggacccgtggtgggctgggggtacccccgggccccgacgaagtggctaccagcctgaatgcgcctgaaatagctccggctgtcgctgccactgatgttcagagacaacaggcagactcatcgccagtgcaccatgagcctgtggttacgcaaacagtgaccgaggtatatacccgccgcgatggccgttctgccagaaagacaaacaggacgctggcatttgcaacacgtgtcacacttgctttcgaccaagagatccgggatatagcagagcgtgaggggttgaaactggtggaagttctggaaaaagcagttgaggcatataaggaaaaacagggctattaatccgggatgcagcaatcttgctgcattctttttttttgtgtgcaatcttgcagcaagatttatgctagataaacgctagattgctgcaagctagataatataatgctcaaattgagtagttaactgccccgtgaagtacgcagtttgagtacttacctgtggtttatgaacgtatttacttaatgtgagtagttattgggcgaagatgaacactcaaattgagtataaatggagatggtatgaaaattttttgcgatgatggttctacaaatgtgaaacttgcctggtttgaaggcaagacgctgaaaagtgcggtatcagtgaactcttttcgccataactggaaagtcgagggcttaggcagcagtcgtacctataactatctgcttgatggccgtaaatatacctacgacccggtcagcgaagatgcgatcagcacgactcatattgagtatcagtactctgatacaaatgtgttggcagttcaccacgcattactgaacagtggaattgaaccccaggagatcgatctcaccgttacgttacctatcagcgagttttacacggctgactgccagaaaaatacgcttaacattgagagaaaaattcacaacctgatgcgggaagtcaccctgaacaaagggggaacttttaccattaaaagcgttgaagtgatgcctgaatcactcccggctgtatttactcgcctagttgctgacaatgttggccagtacgaaaaatcattggttatcgatctcggtgttacaactctggatgtcggggttattgttggccagtttgaggatgtttcggcagtacatggtaatcctgatattggtgtatcaatggtcacgaaagccacgctcactgcactgaaaatggccagcagtgataccagtccaatgattgctgacgagttgatcaaaaacaggaagaacctggattttgtggggcaggttgtaaatgaggtctctaaactaaatctggtgctggataccattgatacagcgataaataaactgggcgagctagttgttgatgatttgctgcagtatcgaaacgtaaaccgcgtatatattgtcggtggcggggcagcactcattgctgatgctgttcgtaagacatggaaccaccttggcgaaaaggtggtccttatggatgaacctcagacagcgttggtccaggctattgcacgcttcaaagcggaagagtaatcgatgtacgacggcgaagaaaggaaaaaactttcactctaccttcacccggaggactctgccgattgtcttgcactggctgaaatcgaaactgttccccggaaaaaacggggggagttatatcggcaggctttgataaccggcctgataatgcatcagcttgatgagcgaattcccgccgtgttaaccgcgctattcaccagagaactgaatgcggatgaggtcattagtcagattgccaggataacaggctggaaaccctcctccggtgatttaaaagaggtactgaaggcgttgggagggcttcagagtacagtttcaccagaatactctcaggatgacggtgaacaggcccgtctgaaagcggctagggtgaagatgcaaaacctgatctaaaaaagtctcgctccatgaaacctgcaaaatttcgcggggtgtgcggcttaatttttagatttccgcatttcccgccatttgagtcaatggagtgctggttgacagctccccgctctgaaggacggggattcccacatatgcagccagatttccgggtagtgtggtttcagacgttgttcgatttcattctgtagcgcctgaagtgtgcctgatttgaggttttttgtgctctggcggtcgaaaagaatttcaatgcggatcatgttctcatctccctttgcttttgctgtatgcatatacagtattctaataactgaattcacacagtcaaatgtccttattgtgactaaaaaacgctcagctctctgagtgtgtgcctgtatgcctgctgtggactgctgtgtccagcttatccacagcattatgcgcacggttctgtggacaaaatacctggttacccaggccgtgccggcacgttaaccgggctgcatccgatgcaagtgtgtcgctgttgccggcctcctcacccggtcacgtttcgtcgttcctcctccacgcgctgcggcttcggggccgtacctgcattcgtatgcggtcgcccggttacaggtgcggcacggcctgatggaggccgcatgtaagaggataattcccatgccaagctggtgcgccaatcgtatgtatttttctgccgaaccagcacagattgctgagattaaacgactggccagcggtgccgtcacaccgttttatcgccgcgccacaaatgaaggtattcagttgtttctggccggaagtgccggacttctgcaaaccactgaagatgtgcggtttgaaccatgccccggactgagcgctgccggacgtggcgttgtatcgacggaaaatattgcgttcacccgctggctgacactcctgcaggacggtgtactgctggatgagcaaaactgcctgatgctgcatgaactctggctgcagagcggtactggacagcgtcgctgggaaggattaccggacgatgtcagggataccatcaccgcacttttcaccgcaaaaagaggtgactggtgtggcttctggagtaacgaggatgtatcggtgtggtggaaccgtctgtgtgacaacatcctgccggaaaaaaccatgccgtttgacctgctgacggttctgcccacccgcctggatgttgaagtgaatggctttaacggtggtgttctgaacggtgttccttctgcatatcactggtatacggaacagtatggcgtgaagtggcctgtggggtatgaggtgaatatcagtagtcagggagacaacttcattcaggttgatttcgacacgccgtggtgtcagccggaaagcgacgttattgcagaattaagccgccgtttcagctgcacgctggagcactggtatgccgaacagggctgtgatttctgtggctggcagttgtatgagcgcggagagctcgttgatgtgctgtggggggaactggaatggtcttccccgacagatgacgatgagctgccggaagtcaccggacctgcgtggatagtcgacaatgtggcgcattatggcggatgaagtatgacggagacgggcgggcaaccgcccgtttcttttccggtaaaggatgtcgccgtgctcctctttttactgcgccggctgacgcggcgcggcataaacgctgcctgtggtcagtgtcccgcgtccggtgggtacgggacgggcgcttttaccgctcccggctggcgtcggtgacagtgtacgccagcctgtcgcccttttctgatgagcgcccttcaagccgctttcgcggcatagccttgccgtcaaaaagacgacggctgcggtattccacggtcggcctgacccgttaccggacgcggtgaacagcccacaggcagcggggaacgggcaccacaggggtgccctcccggtgccttctgtaagagaaggagtgttgttatgtcccgttttgtcctcggtaactgcatcgatgttatggcccgtattcctgataacgccattgatttcatactgactgacccgccatatctcgtcggtttccgtgaccgttccgggcgcaccatcgccggtgataaaaccgacgaatggctgcaaccggcctgtaatgaaatgtaccgcgtgctgaaaaaagatgcgctgatggtgagcttctatggctggaaccgcgtcgatcgctttatggccgcctggaaaaatgcgggattcagcgtggttggccacctggtatttaccaaaacctacacatcgaaggccgcatatgtgggctatcgccacgaatgcgcttacatcctggcaaaagggcgtccggcgctgcctcagaagccattgcccgacgtgctgggctggaaatattcaggcaaccgccatcacccgacggaaaagcctgttaccagcctgcaaccactgattgagagcttcacacacccgaacgcgattgtgctggacccgtttgcaggcagcggctcaacctgtgtggctgcccttcagtccagacgccggtatatcggtatcgagctgcttgaacagtatcaccgtgccggacagcaacgactggccgccgtgcaacgggccatgcagcagggggccgcgaataataactggtttgaaccggaggctgcgtaaatgaactatgccggacacgaaaaccttcgtgctgaagtggcggaggtggccaatgccatgtgtgaccttcgggccaggctgaacgatatggagcatcgctgtcgctttgattccgatgtgctcgttgaacgcctggcacgccagacgctgtatcgcgccaatcgcctgttcatggaggcatataccgaaattcttgaactggatgcgtgcttcaaagattaagggggagacgaaatgtacggaacatgcaaaacgctctgccgggagctggcagcaaagtatccgggagacacgccgctgatgctgcttatctggtccccggaagagattcaggccctcgctgacggaatggatatttccctgtccgatcatgaaatcaggactgtcctggcgcgcctggaggacatcccggaagaccagcggactgaatccggtatttcttccgccgctgcgatggagattatcagcaacgtgagcgaaaaccgccaggtgaccgtctctgctgnnnnnnnnnngaactgctggcgtccctgattcagactgctgaacaggcactgtggaaacgtgaatgggccgcccgggatcatggcctcgccgtcccggaatgcgtcacccgccgtcaggcggtgattaatcaggcccgcaccctgctgaaaaacaacacacacgaaaacgactgatgttatcgccgcctgccctgcgggcggcgatacagggagaacgcttaatcatgaacgaaaactgcacgctgaacgcactgatttgtcgtcacgctcgcaacctgctgctggcgcagggctggccggaggagacggatgttgatcagcgagatccacagaactatccgggctggatcagcatttacgtgcggctggatgcgccccggctggcgacgttactcgtcaaccgccacgattgcgtactgccgccggtcctggcttccgccatgcaaaaactgaccggaaccggggcggagctggtactgtccggcagtcagtggcagtcgctgccggtacttccggcagacggaacgcaggtgtctttcccgtatgccggcgaatggctgatcgaagacgaaatcagggctgtacttgcggcggtgcgcgatgcggtacgcagtgtcagttgccgggtggcagaagatgcacggcgtatccgggcggcgctgaccaccaccggtcagacgttgctgacccgccagacgcgccgctttcgtctggttgtgaaggaaagcgattacccctgctggcttgatgaagatgacgaaaatctgcccgtggtgctcgatgccattctgaaccgtggcgcacgtttttcctctgtggaaatgtacttggtctgtgagtgtgtggagcatatcctggccagtggtctggtctgtgatgtgctgcgtataccggatgaaccgtcccgtcgctggtttgaccgggatattctgcgggaggttgttctggaggcacgggatgaaatccgcagcatggcggatgcactggcgaaaatccggaaatgatgacgctggcggggaaaaatctccgccttttccagccggtccccggacagagcacaaaggaagtcgccgccggctccgctttacccggccatgcagggcatggccttgtggtttttcagttatgtggcctcagcgtcgtgtgcgggctgtgccgtgcctccatcttagccgggctggcgttgatgcaagggtacgcttcgccgctgcggtcacccggtccctccttcccgtctgccgtgattttccggtcgttcacccgctcagatttcgcggtctcaccctccaactcccgtcagccgtgtgcgtcaggctgcggcttcccttgcgcccttgcatccccgccttatcgcccggcttttctggaggcacggcaccgcccggtgtcgcggaatatgtgaacaacggaggaaaacatcatgcaatatgcgaaacctgtcactctgaatgttgaagagtgcgaccgtctctcctttctgccttacctgtttggcaacgattttctgtatgccgaggcgtatgtgtacgcgctggcgcaaaaaatgatgccggaatatcagggaggcttctggcacttcatccgcctgccggacggtggcggttacatgatgccggatggcgaccgttttcatctggtcaacggtgcaaactggtttgaccgtacggtcagcgccgatgccgcaggcatcattctgacttcccttgtgattaaccgccagttgtggctgtaccacgacagcggggatgcaggactgacccagctttaccggatgcgcgatgcgcagttgtggcgtcacatcgaatttcaccctgaatgcaacgcgatttacgcagcactggactgattaacggacggggcggcaatgccgcccctgtaaaggagacgagaacatgtactgtactgttaaagaaatcatccgcgatgtactggatacagacgtgccgcacagtgaatgcgtttttgccgtggtgctgacccgtggggatgtgcgccacatagcccaggactggagtctgacagacgatgagctggaaaccgtcatgcagcgactggacgatgcctttgagcatggtgcggatgtcagcattgttcacgacgttgttcgtgagctgatggaagaaaagcgcgccagccgtcaggtgacagttccggcggtgatgctggaaaaagtgatggcgctggcaggcagtgaaatgaagcgcctgtatgccgtcgggagcgagaacgggggcgacggtgacgcattcgtcagggaagaacgcgaagcaatggacgttgtgttacaggcgctggacggggagacgatgtcatgaatatcagcacggaatcccgcgaaattctgcgtaattacagggccgtgattaatgcgcggcgtcgtgaaatggggcagaaaccgctcaccaccgcgcagattgttgatgaaatctgcgattttgtggcgaatcagcaggcggttttcctgggcggacactacatcttacagggtagcagacactggtgatacagggcaggcggtggaggccgcctgtcagtccgcgcgaaaacccctggcaggctggcgcctgccggaagggaagcgggccacgctggcgcgtcgcccgttacccttcccgtctgtgatgtgtctgactcaggagtgtttctttcttatgttatggaactgttcctgatgttgttgttcctttatctgctgctctgattctgactactgcagtgttgttctgtctgccgggtcgggtagcagcggcacattgctgcgccgccgccccctaagaacggagcgtgcgagttttcccgcactccgctcaagcctttataagtg

SEQ ID NO: 270 - DNA, 14790 bp, Escherichia coli
  source 1..14790: mol_type = genomic DNA
gaataatatagtatattaattacgtggttaatgccacgttaaaaattgaaactgaaaatcgccgatgcagggagcagccactccctgcatcgactgtccatagaatccttaacggaggttcctatgtgtgcgatggatcgtagagaaagagcactcatcagtcaattgcatttccctcatagtcttggagaggctatttcgtttttaaaatatcctgtatgtgtccgcttcgaggatggttcttttattaaggaaaataactgctttgaaaaacttatcagatcgtcatttaattcatgtgatgaatggtttgatagtttaacgttggaatgtaaattacagttatccagagcagagattgaatcatgctcttctatttatggtgtaaattgtaatagtgacatattacttaataatacgttatggagtgtgatcatagaaagtgttataacaccatgcggctatttctttatctggaggtttatttgggtagtaaatgataatctgtcatcgtttgttgtgtctaaatactccaatgaattaattgtaccctctgatgaatatgtaggcattgagccatatctgatagggtttagccatcattattcatcagcaaagatgaatatcactgtgtctaaatcaaagaagaaaaccatgaaattatttaaacgatatggatttagttctagagatctctggttggatgaaatgattagaacggaaaagatacttcctttatatgctaaagtaaaagaaatattgggaagataagctgttaacttattgttactttgcgggaaccattggttcccgtttttgttaatataatttactctatttttgttttcattaaagatgatttatatgattatattttattatctcaagtaattatgcggagggaacgtgagcagagggagaaccagagccgcaccaggtaacaaagtcttattaatactggatgagacaactaatcagaaacttttagcagccagggatcgtagcggaagaacaaaaactaatgaggtgttcattagactaaaagatcatctcgatcgttttcccgacttttataatgcatctttagtaaaggaggaagctgaagacatagacgatatataaagagttttattttttactatcaatattaaacagaggaatcatatggacgccgttttaagtgttcagggtgcttctgcgcccgtcaaaaagaagtcgtttttttccaaattcactcgtctgaatatgcttcgcctggtacgcgctgtgctcccggctgctgttctgatgatgttcttcccgcaactggcgatggcttccggtagtcaggacctgatggcaagtggtaactccacggttaaggcgaccttcggtaaggactccagtgttgttaaatgggttgttctggctgaagttctggtcggtgctgtcatgtacatgatgaccaaaaacgtcaagttcctggccggttttgccatcatctctgtatttattgctgtgggtatggccgtcgttggcctgaaataaaacgatgtcgggagacgagaataaacttaagaaatatcgtttcccggaaacactgaccaaccagagccgctggtttggactgccactggatgaactgatccccgcagcaatctgtattggctggggtatcacaacatcgaaatatctgttcggtattggtgcagcggttctggtttatttcgggattaaaaaactgaaaaaagggcggggcagttcctggttacgtgacctgatttactggtatatgccaacagccctgttgcgcggtatttttcataatgttcccgattcgtgtttccggcagtggattaaatagaactgataccaggattgttatatggaacacggtgcccgtttaagtaccagtcgtgtaatggccatcgcctttatatttatgtcagtgcttattgttctcagcctctctgttaacgtcattcagggggtgaataactaccgtcttcagaatgagcaacgcactgccgtgacgccaatggcatttaatgccccctttgccgtgtcacagaacagtgccgacgcctcttatttacagcagatggcgctgtcatttattgccctccgtctgaatgtttcatcagaaaccgtcgatgcctcacatcaggcgcttttgcaatatatccgcccgggcgcacagaaccagatgaaagttattctggctgaagaagcgaagcgtattaaaaacgataacgtgaactcagcctttttccagaccagtgttcgtgtctggcctcagtatggccgtgtggaaattcgtggtgtgcttaaaacctggattggtgattcaaaacctttcactgatatcaaacattacatccttattctgaagcgggaaaacggggtgacctggctggataatttcggggaaacagacgatgagaaaaaataatacggcaataatattcggcagcctgtttttttcctgcagcgtgatggccgcaaacggtacgctggcccccaccgtggtgccaatggtgaacggtggtcaggccagtattgccatcagcaataccagcccgaatctgtttaccgttcccggtgaccggattatcgccgtgaacagtctggatggtgccctgaccaataatgagcagaccgcctccggcggtgtggtggttgccaccgtcaacaaaaagccctttacgttcattctggaaacagaacgaggtctgaatctttccattcaggccgttccccgtgaaggcgcggggcgtaccattcagctggtcagtgacctgcgcggaaccggagaagaagccggtgcgtgggaaacgtccacgccttacgaatccctgcttgtgaccatcagccaggccgtccgtggcggaaaattacccgcaggctggtatcaggtcccggtgacaaaggaaaccctgcaggccccggcggggctgtcttcagtggcagatgccgtatggacggggaatcacctgaagatggtccgctttgccgtggaaaataaaacgctgtctgctctgagtatccgggaaagtgatttctggcagccgggaacccgtgccgtgatgttcagccagcctgccagccagttactggcaggtgcgcgcatggatgtgtatgtcatccgtgacggggagggcaactgatggccagtatcaataccattgtgaaacgcaagcagtacctgtggctggggattgtggttgtcggtacagcctccgcgattggtggggcactgtatctgtctgatgtggacatgtccggtaacggtgaaaccgtggctgaacaggagcctgtgccggatatgaccggtgtggtggatacgacctttgatgacaaggtgcgtcagcatgccaccacagagatgcaggtgacggcagcgcagatgcagaagcagtatgaggaaatccgtcgtgaactggatgtcctgaacaaacagcgcggtgatgaccagcgtcgtattgaaaagctgggacaggataatgctgccctggcagagcaggtgaaagccctgggtgcaaatcccgtcaccgcgaccggtgagcctgtaccgcagacgccagcctcaccgcccgggccggaaggcgaaccacagccaggaaacacccccgtatccttcccgccgcagggcagcgttgctgttccaccgccgacggcgttttatcccgggaatggtgtcacgccaccaccacaggtgacctaccagtctgtgccggtgcctaaccggatacagcgtaaggtgttttcccgtaatgagggaaaacagggaccatcactgccgtacattccgtcaggaagttttgcgaaagccatgctgattgaaggggcggatgccaatgcctctgtcaccggtaatgaatccacggtgccgatgcagctgcgtatcaccggcctggtggaaatgccgaacagcaagacgtatgacgcaacgggatgttttgtgggtctggaagcctggggtgatgtgtccagtgagcgtgccattgtacgcacccgcaatatcagttgcctgaaggacggcaaaactattgatatgccgattaaggggcatgtcagcttccggggtaaaaacggtatcaagggcgaagtggtgatgcgtaacggcaaaatcctcggctgggcatggggcgcgggatttgttgacggtatcggtcagggaatggagcgcgcctcccagccggctgtcgggctgggtgccacagccgcttacggggctggtgatgtcctgaaaatgggtatcggtggcggcgcatcgaaagccgcacagacgctcagtgactactacatcaaacgtgccgaacagtatcacccggtgataccgattggtgcgggcaacgaagtgaccgtggtgttccaggacggcttccagctgaaaaccgtggaagagatggcgctggaatacacgcagagcagagcggaagaagacaatccggaaagtccggttcctgttccgccatcggctgaaagtcatcttaacggctttaatactgaccagatgctgaagcagctgggcaacctgaatccgcagcagtttatgtccggcagccagggagggggcaacgatggcaaataatatgtcactccgtcagatatgccatgccacccggtatgttgttgcccagggcctgtgttggttgttctggtgtctgaaatacgccgtcattctgccgctggccacaatggctctgctggcgttactggttttatggaaggacaacaccacaccggggaaattgctggttcaggagatcgagtttgtaaggggcagaacgccagccgggctgtatccggtccgatactgctcgaacagttttggttccgatttagcgatgcctccgtctgtaacgtgcggttttcgccggggggatgctgcagaatatgccagggagactgaccagtctctgatgcaactgttcaccgcattatgggcaacgctggcactgatgtatgtctcgctggcggtgatctccggaaaatatccgatgcgacccggaaaaatgaaatgtgtccgggtggcaactgcagatgaacatctgaaggaagttcttacggaagatgcttccctgccggaaaaaaccaggaaatgccatgtttatttccctgatgaccgaacaaacagaagcaacggagataaaaatgaacatgcgtaatattaatattattactgcacgctctgtaccggataaaagcgtatcagataattttatgaatgctgttctcagtaactgcaccacaagaatcgtacttcctgcactgaaggaattcggttctgaatcattgccgcacaattttaatatggcagctgtcggtgtgatgaagaagggtatgtcgatgagcttattttcttctccgggaaatacagtagtcttcggacaaccctgtgcagggaaaacaaatctgacagcagagttaatttctgctgttgtggggaataataaaaaaggagaagggcaatgaaaaagatttctttatttattcctctgctggggacgttattactttctggctgtgccggaactaatacggaatttgagtgtaacgccaccacatcagatacctgtatgacgatggagcaggccaatgagaaggccaaaaaactggagcagtcctcagaagcaaagccggttgcggcatcactgccgcgcctggctgaagggaacttccggacaatgccggtgcagaccgtcaccgcgaccactccgtccggcagcagacctgcggtgacagcacatccggagcagaaactgctggcacctcgcccgctgtttatcgctgcccgggaagtgaaaacgattgttccggtcagttcagttacgccggtaacacctcctcgtccgctaagaacgggtgagcagacggcagcattatggatagcgccttatattgataaccaggatgtttatcatcagccatccagcgtgttttttgttattaaaccgtctgcgtggggaaaaccacgtattaattaactggccctgaagttgtatatcagccggcaatgccggcgggctttctgtattcaaaatctgcctgtaaaacgagtgccctgtgcgtgaaaagggatgggcggtagcgtgtcagaacatgtcgggaggaatattccgtgagtgatgaagccgatgaagcatattcagtgacagaacaactgaccatgacaggaataaaccggatacgccagaaaataaatgctcatggtattcctgtttatctctgtgaagcatgcggaaatcctattccggaagcccggcggaaaatatttcctggtgtgacgttgtgcgttgaatgtcaggcgtatcaggaaagacagagaaaacattatgcataagtcagtcgcagaacatagtgatttaattccggatgaacatgagtggatattcagaaaacagaaatctttgtatatgcgccgggaaatggcgcgttaattacaggtattcccttcatggctaccgcatttctcgctttatttttcaactaaggaattcatgtgaataacccacttgaggccgtcactcaggcggttaactccctcgtcacagcactgaaactgcctgacgaatccgcaaaggccaatgaagttctgggcgaaatgagcttcccgcagttcagccgtctgctgccgtaccgtgattacaaccaggagtccggtctgttcatgaatgacaccacgatgggctttatgctggaagccattcccattaatggtgcgaatgagtccattgtggaggctctcgatcatatgctgcgcaccaaactgccgcgcggtattccattgtgtattcatctgatgtccagtcagctggttggtgacaggattgaatacgggctgcgtgagttctcctggtcaggtgaacaggctgaacggtttaacgccattacccgggcctattatatgaaagcggcagcgacccagtttccgctgccggaggggatgaatctgcccctgaccctgcgccattagtggcggataaccccctgacaccggcaggtctgctggcccctacctaccgtaaccagctggcgtttatcgatattttcttccgggggatgaataacaccaactacaacatggcggtctgtggcacctccggggccggtaaaaccgggctgatacagccacttatccgcagcgtgctggactccggaggctttgccgtggtgttcgacatgggggatggctacaagtccctgtgtgagaacatgggcggggtgtatctggacggtgaaaccctgcgttttaacccgtttgcgaacatcaccgatattgaccagtcagcggagcgtgtccgcgaccagttgtcggtgatggccagccccaacggtaacctggatgaagtgcatgaaggtctgctgctgcaggcagtcaaagcctcctggctggccaaaaagaatcaggcgcgcattgatgatgtggtgaatttcctgaaaaacgccagtgacagcgagcagtatgccgagtcaccgaccatccgcagccgtctggatgaaatgattgtgctgcttgaccagtacactgccaacggcacttatggccggtattttaactctgatgagccgtccctgcgggatgatgccagaatggtggtgctggagctggggggactggaagaccgtccgtccctgctggttgcggtgatgttctccctgattatctacattgagaacagaatgtaccgcacgccgcgtaacctcaagaaactgaacgtcattgatgaaggctggcgtctgctggacttcaaaaatcacaaggtcggtgaatttattgagaaaggctaccgtaccgcccgccgtcataccggtgcctatatcaccatcacacagaacatcgtcgactttgactctgacaaggcatccagtgctgcccgcgcggcatggggtaactcctcctacaaaattatcctcaaacagagtgcgaaggagttcgcgaaatataaccagctgtatcccggagatgcagaaagcactggacagccgtgtttactttgaccagcacggtgtgctttgccagcgcctcggcattgaccaggtcccggcacgggtgagcgccgttcccggcgatcgcttcctgaaggtggaatttataccggcagaggagggcagaaaatgaagcgaagcctgtggctgctgatgttattccttctcgccggtcatgtccctgcagcgtctgcggattctgcctgtgagaggcgttttgtaaacccgatcacggatatctgctggagctgtattttcccgctctcgctgggcagtatcaaagtcagtcagggtaaggtccccgacacggcgaacccgtcgatgcccattcagatttgtccggcaccgccgccgctgttcaggcgtatcgggctggccattggttactgggagccgatggcgctgacggacgtcacccggtcaccgggatgtatggttaatctgggcttcagcctgcctgcttttggtaaaacggcacagggaacggcaaaaaaggatgagaagcaggtgaacggggcgttctatcacgttcactggtacaaatatccgctgacgtactggcttaacatcatcacatcgctgggctgtctggaaggtggtgacctggatatcgcttatctttctgaaatcgaccccacctggacggacagcagcctgaccaccattctcaatccggaagccgtcatctttgccaatccgatagcacagggggcctgtgctgcagatgccattgccagcgcctttaacatgcccatcgatgctctgttttggtgtgccggttcgcagggaagtatgtacccgtttaatggctgggtgagtaatgagtccagtccgttgcagtcttccctgctggtcagtgaacgcatggcgttcaagctgcaccgtcagggcatgattatggaaaccatcgggaaaaataacgccgtctgtaatgaatatccgtccccaatcctgcccaaagaacgctggcgttatcagatggtgaatatgtacccggacagcggacagtgccacccgttcgggcgcagtgtgacccgctgggaaaccgggaaaaatccgcccaatacaaagaaaaacttcggctatccgcatgttcagccagatcgccaatatcatgctttactgcctgtttatttttttctggattctcgttggtctggttttatgggtaaaaataagctggcagacgtttgtgaatggctgcatttactggtggtgtaccacgctggaaggtatgcgggatttaatcaagtcccagccggtatatgagatccagtattacggcaaaaccttccggatgaacgctgctcaggtactgcatgataaatatatgatctggtgcggtgagcagctatggtctgcattcgttctggcgtctgtcgtggccctggttatttgccttatcaccttctttgttgtctcctggattctggggcgtcagggtaaacaacagagcgaaaatgaagtcacaggtggtcgtcagctgacggataacccgaaagatgtggcccggatgctgaaaaaagacggcaaggactccgatatccggattggcgatctgccgattaaccctgctggacggtgccgcacgtcataacgtacagatcctgataaccgacagcgggcagcgaaccggtacaggcagtgcgctgatggccatgaaggatgccggggtgaacatatatcgctggcagggcggagagcaacgaccggcaaccatcatcagtgaaccagaccgtaatgtccgctatgcccggctggccggggactttgcggccagcgtgaaagccggagaagagagcgtggcacaggtcagcggggtacgggaacaggccatactgacacaggccattcgcagtgagctgaaaagacagggcgtgctcggacacccggaggtaaccatgaccgccctgtcaccggtctggctggacagccggagtcgttatctgcgggatatgtaccgcccgggaatggtgatggagcagtggaacccggagacacgcagtcatgaccgctatgttatcgaccgggtgcctcgtctggagggcgcatgggcaccggagcactccgtgacggagttcagtcacagccaggaagcgaaactggcagaagcgcagcagaaggcgatgctgaaaggcgaggctttcccggatgtccccatgacactgtatgaagccattgtccgcgactataccggcaggacaccggaagcacgggagcagacgctgattgtcacgcacctgaatgaggaccggcgcgtactgaacagcatgattcatgatgcacgggaaaaggccggtgagctggggaaagagcaggtcatggtgcctgtcctgaacacagcgaatatacccagacacgcagagtctccggtgtacagccaatctttggggcaatggaacaaattgccgcccactgtgagtcatattcgccctgactttccagaaccatacgaatcgccctctgacggacttcgggggaaaaacgagtatttttagtcatcctgtttacctctttctcagggagtttagtctccaggattcccggggcggttcagtaaggttgtcttcgggtacgtttacgctaccggccagattctgcagggaaatactgccggatgacgtccggagtatcaccattcttctggaaaaaagcgaggatgactggtggtacggaagttactgatacatcactgacgccttcgcgttgctcagttgtccaaccccggaaacgggaaaaagcaagttttccccgcttccggcgttttcggtattatttaatgaatggcataaaacgctggtcccgcccggggacggtacacacatttagatattttctgtttttttgtcatttcattatcaaaatcacattaaacggtcgtaatcagacatgatttgtgcgccaacacagatcattgtcacaattctcaagtcgctgatttcaaaaaactgtagtatcctctgcgaaacgatccctgtttgagtattgaggaggcgagatgtcgcagatcgaaaatgcagtaacttcctcaccgaaacgcatttacagaaaaggtaatccgttaaccggagccgagaaacaacgtatatctgtttcccggaaaaaggggacacataaagcgattaatgttttcatccagagtgaactcaaagatgatttgacacagctttgtaaagattcgggcttaactcaaaaagaaatgatagagcactggattttgaaagaaaaagctgcgatggatgatgcgaacagaaggtaactaagttactttcttgaacatttgaattgcggatgctagattactgatcgtttaaggaattttatggctggccacgccgtaaggtggcagggaactggttctgatgtggatgttgtacaggagccagaaaagcaaaaaccccgataatcttcgagaagtttggcgactaagagaagattaccggggcccacttaaaccgtatagccaacaattcagctatgcggggagtatagttatatgcccggaaaagttcaagacttctttctgtgctcactccttctgcgcattgtaagtgcaggatggtgtgactgatcttcaacaaacgtattaccgccaggtaaagaacccgaatccggtgtttacaccccgtgaaggtgcaggaacgctgaagttctgcgaaaaactgatggaaaaggcggtgggcttcacctcccgttttgatttcgccattcatgtggcgcatgcccgttcccgtggtttgcgtcgacgcatgccaccggtgctgcgtcgacgggctattgatgcgctcctgcaggggctgtgtttccactatgacccgctggccaaccgcgtccagtgctccatcactacactggccattgagtgcggactggcgacggagtctgctgccggaaaactctctatcacccgtgccacccgtgccctgacgttcctgtcagagctggggttgattacctaccagacggaatatgacccgcttatcgggtgctacattccgaccgatatcacgttcacaccggcactgtttgctgctctcgatgtatcagaggaggcagtggccgccgcgcgccgcagtcgtgttgaatgggaaaacagacagcgcaaaaagcaggggctggataccctgggtatggatgaactgatagcgaaagcctggcgttttgtccgtgagcgtttccgcagttaccagacagagcttaagtcccggggaataaagcgtgcccgtgcgcgtcgtgatgcgggcagggaacgtcaggatatcgtcaccctggtgaaacgacagctgacgcgtgaaatcgcggaagggcgcttcactgccagtcgtgaggcggtaaaacgtgaagtggagcgtcgtgtgaaggagcgcatgattctgtcacgtaaccgtaattacagccggctggccacagcttccccctgaaagtgacctcctcagaataatccggcccgcgccggagacattcgcacgcctgaagcctgtcagcgaacaaaaaagcagcactgcatacaaaaaacaatctcatcatccaccttcaggtgcatccggttccccctgtttttgatgcaaaacacctcccacagacggggaattttgcttatccacatttaactgcaagggacttctccataaggttacaaccgttcatgccataaagcgccagccgtcagccctacagggtgcaatgtatcttttaaacacctgtgtatatctcctttaaactacttaattaccttcatttaaaaagaaaacctattcactgcctgtcctgtggacagacagatatgcacctcccaccgcaagcggcgggccccgaccggagccactttagttacaacacacaaaaacaacctccagaaaaaccccggtgccgcgcagaactgaaaccacaaagcccctccctcacaactgaaaagcgccgccgcccccgcccgaagggcgggaacaacatcgcttttaattatgaatgttgtaactaaccatcatcatcgctgtcagtcttctggctgaaagttctcagtacacgctcgtaagcggccctgacggcccgctaacgcggagatacgccccgacttcgggcaaaccctcgtcgggaccactccggtcgcgcacaaaaactctctcatggctgaaagcgggtatggtctggcagggctggggatgggtaaggtgaaatctatcaatccgtaccggcttacgccgggcttcggcggttttactccggtatcacatgtaaccacagcgtgccgccttccatgcgctgacgcgcataaacaacaagttgctacattagcttacaagttaattcatcttgcatgaaattagtatataggttaatgttaatcaaaatgggaggtcatatgtttagcgttgtttatcacccggaagccagggaagaagccacagcattacccgtaaaaatcagggtgaagtttgaccgtctcattggcaaactggagtataaggcccgattactgcgggaaccggacacaaagcccctgggtgatggactttttgagatccgcacgatggggatggacatagccagaggcatttgggtataccacaaaggcaataccatcatcatgctccgggttttcatcaagaagtctcagaaaacgccagcaaaagaaatagatctcgccaaaaagcggttagcggaggtacttaatgaaactggtaagtcataaagaactgcataacgagtggatgcagagcgacgaatatcgcgctgcatggcaggaagaagaacgcaaggagaagctcagggcgttgcttgcagaatggcgtaagcatgacaacctgacaaaagcgcaggttgctgaacgaatgggggttacacctccggttatttcccgcctggaaaacaacatcactaaagccagcatcgatacactgactcgctatgcccatgcgtgcggtatcaaaaaacctgtaattgtcctttattgaatgaaggggggagtcaactatgaatcgcgccactcgttacgaaaacgccaatcacctctggacgcactgaactttccggctgcttctccaggcagttaagccagcggtttccctgctgaaaaatatccgcaaaacggggaagcatcagaagggcggggtgactccgtccggccagtgaaccatgccgcactcaggacagtacatgccgccggcgctgataccggcaagaatggttgcaaactcccgctccgtgcagcgggcaatttccggatacccttcgtcatcaacacgaacaaaccagaagacccgctttttgtttcccgcatccacaaagaacggaatacccaggtcagcacagcactcaacggcatcgtcaaaattatcaaagcgcagaacttttgcgtcttcttcgtcaaagaagtcatcggcgtgaagttttacaacgtagcggggaagtttgcttctttgagatgcggattttcgtttacggggtttagctgaacgggccatataactacctgaaagacaatgatattgtctgttttcataacggtaatctcaggtcatgacaagccacagttgtcaggctgcctattcgacgctgatgacacgtcagtaaaagtgttgcatcgggcaggaagaaggcgaaaattttgtggcatactatttttctctgagtactccccataaagtacgggctccctgacgaagaggagtacgtctgattttcttttccctgtcaagagtcataaggtaatacctggcctggtaatgactccaacttattgatagtgttttatgttcagataatgcccgatgactttgtcatgcagctccaccgattttgagaacgacagcgacttccgtc

SEQ ID NO: 271 - DNA, 14772 bp, Escherichia coli
  source 1..14772: mol_type = genomic DNA
cttgaaaaaagcgaaagactctattacaggcttaaaggaattcgctgataatatcaagccagctaaattaaggttcgatactgtcactaaaggctataagaaagcacaaagtgaagtagataagattgctcaacagaaagctaaaaccgaaaaacaaaatcaaagagcacaagctgccgcagcaagagcacaggcaaggcaacagcaacaaatagcagcacgtaaagagaaagcagaattaaaacttctcgatgtgtcaagctctatcagtgcaatgcaccgcctctctgtagcggaacaatacaaagctattgcacaggctagagagatagcaaaacaatatgagcaaggggctatctcgcttgcacgtatgaatagtcagatgaaacgcctacaacagcaacaacgtaagattaatggcaacagaaaagctcaattagcccccgttaagggaggatcagggaattccgccactatgggcgctctgttatttggaggcgctacggctgctgctggcgtgatggctgttagtaaagcctctgaatttatggctaacagctttgcgaatgctgaaaccaccggcgagctaattcaacgtgccaagctgggcggtgtagacgttaaccagatgtacaacgttacagaatgggcctataaaaacggcgttgactctatgatgggtgatcaaggggctaggaaatacctggatcagatgaaagatgttagggaacgtgccgcaaaatcctacagtgaagctgaattggtgaaagacaagaaaaccggaaaatctgaatggaaaggcggtgataacggtattaatgaacttctaaacatcggtgttattaacaagagcgaccttaaaaaatttgctgataatccggctggattaatttctaaggctgttaatggaatgatgaaaaaagggttttcagactcccaaattggacaacgtttagaagacctgggcgatgatttgatgcttacatcaaaatattggcaacgttccgttaaagatgtacaagaaagtattaatcagcaaaaagcctctggaaaatggctaacagaaacacagcaagaatctattgttaaattcagagaactaaacagacagctttcacagctttctgatgcaagacaagtagcatttgtagacggctttatgaaatctcttgatccaaaagtaacggaagagtttatgaaaaacctttctaatctcactccgtattttacgaaactaggggaagcgtctggaagtctctttgaggccattatgaagattgtaaactggtttaatcgtaatgatgataagacagatgctattcagaaaaatttaggtgatgcaccgccattaagcaatgacggaatgaaacagaatctttctaatctcgttcctgatcaatataaaggcgctggcactgcaacaacagcacctgataatagtcattctctctttaatacgattaagggatggcttttcgatgataatgcttcttctgtgtcagatgtaaaaatgtcagtcaatgaagcaccgataagcaatctcaaacagggtgctttaaataatcttgcaatgacaactccggcttataatttatctcctgtgtttaatctgaatcctacatttgaagtggtaacagaggttcctcttactattaattcagacacatcaagattaagcgattatgtggattttacagcgagagcaagtcgggatagcttcttgaaatcattaacattaaccagcttatcaggacaatccaacggcgggtaattcccgccataacattacaaggaaattattattatggcgaccgccgggattttaaccatacgatcagcaaactccccagaacaacacgttcaggctgtttacaaagcagaacaagatataaactctacaaaaaacgaaaatagcaaagctaataaaacaaaaggtgaaaatggatttgctattgttaccagtggcttggcatcttctggaaacgatgtttatgaaaattatatggcactggcctttgacagtgttgacgatgtgaacgtgagacgttcggcagatgttacaagctaccccgtagaaaatggtgctactgtgtctgatcacgttcaaattaaaaacaataagttttctcttaaaggtaggatcactgaaacaccgattaaaagcgatcctggcttgctaaagagtgcaggggtgaacgggaacagaagatcattagctattgattacctgaatcagattatggacagtagacagccttttcttcttgttacagaaaataaaacttttgagaacgttgttttaacaggcatcgaatacacagaagaggcaagcgaatccctagtatttgatcttagctttgagcaaataagattagtgtcttatggcacagtaaacactgtagctatcaaaacacagccatctaagaacatcggggctaatatgaaaaaacgtgttaacactgaaaaatcaagtagtgaaggtgaagacactataactcctgcctttaaacaggaatagccgtaaacgcctctaaaacgctccgtaacgatgtaattataaaagaggctaccaatctatgttgaagcctctttgttgcgtctatggcgttgttttacgccttaaatttgattttttattgattgataagcctttctctatttcagggtagcgtagaagctcaatatattttttaagctctactggagaagctgcattcttgctatatgtgcggaatgtctctgtattgccgcgtgtatggcccaggagaagggcgatcctgtcttctggaatttgatttcgatcaagaagctgtgctactccgtgtctcagagaatgaaacactttcctttctgttcccttttcccctaaagcctttcgtttagctcttgtaaatctctgcgtgtgccacgtggaacgtttaccatcagcacgctctgtaatgctggcgtgatagaacaaaaagccattatgaggtttttcacgcagcgacaacaccaacggagtgataaggctatgtacaggcacaacacgtgccgcagctttcgtttttccctgtgtgatttcaaaacacagcacaccttcgatctctttcacatcgtctattgtgagacttgctatctcattgatccgcatacctgtatataaaccgataagacacaaagccatcatttctttgttttctgctgaattaccggaaaatacttgcaacacctgcaatagctctttgttagaaaatgcctcatagctctctctactttgtgccacatcaagcctatgccctcgccagggggagagcgccctttctggcgcatcgtggtaacgtgatgaagctaactcccatagctgggccattgggctgatataatttgcaattgattgttgtgaaagggttttttgcatgtgttcaatccagcctgtaacagtggtgcggctcacatcttgcaatgcaatatcaggctttttacggtaggagagaaacatctctaccgcttttcttgccttagctaaagtggctggcttcttcttcgtgctgttaattgtcaggtagatttcaagaattttaagcaatgacggacacgaagacgctgtatcttgcattctggtagctgttttggcgtatttagccttactgcgtaacagttccagcgtgttctctattgtgctgtttacaggggcgacactctcccgtagacaatggtattcatctgcaatctgatcacgctttctacgtgcaacacgaagattacttgtatgcagactcctgacaaacgtcctttttccttcaaaaaagggctgcatatacacaggcaacgtgatcctcaaatagtagttaccgtaagaatcacagattatgtattgattaggcttgtatctcataaactccccggctaaagtgtcggagcgtttgtaatgtgaaaattgattgtaacgcatagaaaatgatgattttttctataagattcaatcaattagtaatggtcgtaggtgatggcattaacacgagattaatcgagtgttttactcctattatcggcaccatttaaatcaataagttaccccatatttaaatacaccacgtttcctcctgtgccgtatttgtgccattgtaaccctggcaattcatcaaaatactgttctgacatcaggcaatgcaggtgcagacatttaagccaattgctgccgccattccttgacgtggtcaatcagggcgcggagctttggtgcaatattgcgacgctgtgggaaatacagatagaagcctggaaattgtggaagaaagtcatcaagcagcgatacaagcttaccgctttcaatatatggcctgaaagtttcctgagtggcaattgttattccttcaccgacaagagccagctgcaacatcagacgcagatcattagtcgtaatctgcggttcaatcgcaaggtcgaaagttctcccgttttcttcaaatggccagcgataaggcgcaacctccggggactgacgccagccgatacacttatgggtatttcccccggaggcgagaaagcgctctccacgcccggccgcaaggatcaggacgacgggggcaggcatgaatcctcctcctgatggagacgtacagaggcgacttctgccagcacggagagtgccagagtatgcgcatcccgggctttgggaaatatcccgacgggtgcccggatttgcgctgtctcctccctggaccatcccagctcgtggagcttttgcagacgtaaagtgtgggttcgatagctgcccaatgcgccgagataaaagggttttgcttctcgcgcggcctgcaacactggcagctcccggttgagatcatggcacagcaaaatgaccgccgtatcggtatcgatctgagcgctggctgaggccggaaaaagatcgaagatatggctgtcatagcctgtggctgctgcaagactcgcggttgcctgcgcctcaagagaacgtccgtaaatcatcagcctgacgcatggcctgaaccccacctcaaagccattgagattccagcccgttcgggtttgcgtgggcaggcacaccaacgattgtgcttgcggatcgtagcgcagccccgccggttttctctgttccaggcggttcagaacggcgagcagaggctgtgccgagcgtagtttatggagcgtcagcgtgatcccaccgccgcagggcagaacgatgtcaaaccacggcgaaccttcgccatagcgaatatcgcgatcgcggcctgagcccatcatctccagcgcttcaaaagcggcagcggcctccacgcagccgccagagacaaaaccgcagtaacgaccatcttcgcgcaccaccatctgcgccccgagcgggcgcgccgcgccgccgcgtatctccaccagcgtcaccagcaccgctcctttaccggacattagcgcctctacggcgaagcgcagaatggtccggtggtcatcggtgagaaacgcctgctctggcttatgccagtgttcgtctttatcaaaaagcgggtatgacattgtttctccttaaaccacatccggcagcttatcgagcagcttatccagagtgatgggataatcgcgtacccgaataccggtggcgttatacaccgcgttggcgatagccgcgctcacgccgcacaggcccagctcaccgacacccttggccttcatcggggaggatatggggtcggtatcatccaggaaaatcacctcctgttttgggatatccgcatggaccggcacctcataccccgccatatcgtgattaacgaagtagcccaaacggtcatccaccgccagctcctccatcagtgccgcgcccatgcccatagtcattgcgccaatgacctggctgcgtgcagttttcggattcaggatgcgtcctgcagcacacacagcgagcatacgccggacccgaacttctcccgtcgcgctatgcacgccgacctccacaaaatgcccggcaaaggtcgactgctggtactccttgctcagtgttccgaattcaatgctctcttccgctatcagtctgccgcctgcggtggcctcatgtagcatggcgcttcgggtaccgttggtaatcttgccgtcggcaaactgcgactgctcaggatcaaacccgactgccgaggcaatcatttcgcgaagcttcacacaggcggcgtaaacgccggaggtggaggtattcgcgccccattgtccaccagaacccgcagaaaccgggaaactggaatcgccgaggtgaaccgcaacctgctccagcggtacgccaagcatttccgctgccgtctgggccagaatggtgtagctgccggtgccaatgtcggtcatgtccgtttccacggtaacggtgccgtttggttcgaggtgaacccgagcccccgatttttccagcnnnnnnnnnnttattgcgaaagcccgccgcgacgccgtggccgactagccactccccgtcgcgcacctgtccgggtgtggcgttgcgctgcttccagccaaatttatccgctccggtgcgcaagcactcgataagctgacggcgagagaagcggcgcgtcgggtcggcggggtcaacctgagtgtcattcaggatgcgaaactcgacgggatcgatgcccgctttttccgccagttcgtcgatcgcgatttcgagcgccatcagaccgggggcttcgccgggcgcacgcatggcgttcccttccggcaaatcaagcgtggcgagccgcaggccggtatgacggtttgccccggcgtagagtaattcgctttgctgtaccgccgtttccggcgtgccgccgggcaggtttccggaccagctttcatgtgagatagcggtgattttcccgctctggtcagcaccaatacgcaggtgctgaagggttgcggggcggtgcgtggtgttattgggaatagtggggcgggggagcatcactttaaccggacgtttcaccgctcgggcggcgagggctgccagcagcgcatcgcttctcaggaacagcttgccgccaaaccctccgccgatatacggggagataatacgcacattctccacgggcactttcagcgtttttgccagatcggtgcggcaccagtcaatcatctgatttgaggtccagagagtaagcttatttccatcccagacggccatcgaggcatgcggctccatcgccatatggctctggtccggggtcgtgtaggtagcatcaatcttcaccgcagcggaggagaaagccccgtcaaagtcaccgacgtttttgtcgggcgtgccttccggcggctgattgacggcctgtttttcgtccgccagggagtaagctcctttattacggcgatagtgcgcctgcaccagcgaggccgccgctcgcgcctgttcgaaggtctcggccactaccagcgcaatggcctgatgatagtgctcaatagtggggccgcctaacagcctggcggtgtttttgtcgcctttgccgagtgccccggcgttactggcggtaatgacagccagtacgcccggcgctttttgcgcggcgtccgtatcaagggcggtgaggcgtcctttggcaatggcggaaccgacgatatagccataggcggcgttgggggcctcttcatgccattcgtaggcgtagcgtgccgtgccggtagttttcagcggtccgtcgatgcggtcatggggacgaccgacaaccttcagctgatcgatcgggttttcccctgcgggtttatcaaatttcatgcctgtgccctcgcttcagccagtacggaggcaagcgttcgcttcgccaacaggagtttaaaggtgttttcagcggtgggatgggcgctggcgaacagcgtgtcatatacggcctgcgccccctgggatagctgagcatccgcagcctcaatgcgccagggcttatgtgctactccgcccagcgcgacgcgcccgctgccgtcagggtgaataatcgccgcgaccgatacctgggcaaaggcgtaggaggcgcgatcgcgcaccttacggtagatatgttttccgccgagcggcggaggtaacgtcaccgcaacgataagctcaccgggaagcagggcggtttcaatgtgcggcgtttttcccggagggtgataaaaatcagccagtgtgatactgcgagtctttccctccggcgtgatggtttccaccaccgcatccagcaaccgcattgcgaccgccatatcgctcggatgggtggcaatgcaggcttcgcttacgcctaccaccgcgtgctgacggctaaagccttcaagcgccgcgcagccgctcccgggcaggcgcttattgcagggctgattggtgtcgtaaaaataggggcagcgcgtgcgctggagcagattacctgcggtggttgcctgattacgtaactgaccagatgcgccagcgagcagggcgcgggagagtaccgcgtaatcacgacgcacgcgctcgtgagccgccaggtcggtgttccgtaccagtgcgccgatgcgcagcccacccgcgtcggtcacttcaatcttatcgagcccgaggccgttcacatcgataaggtgggtgggcgtttcaatttccagcttcatcaggtccagcagattggtcccgcccgcgataaattttgcgccgggtacgcgctgagcgctaagtgccgcctcggctggggtgttcactcgttcataggtaaacgccttcatgattttatctcccccgcagcatcttcaatggcggcaaggatgttagcgtatgcaccacagcgacggatgttgccgctcatacgttcacggatctcatcggcagttgtttctggagcggaaaccaaatcgaccgtgacgtgactgggaatgccgtcctgaatctcttttagcaccgctactgatgagcaaatttgcccggaggtgcagtagccgcactggaagccatcatgcttgataaaggccgcctgcatggggtgaagattatctggcgagcccaggccttcaatggtggtgatctcggccccctgatgcatgactgcaagcgtcaggcaggcattaagcctgcgaccattgaccagcacggtacaggctccgcactgtccgtgatcgcaacctttcttggtaccgatcaaatgcagattttcacgcaaagcgtccagtagcgtggttcgggtatccacctcaagctgctcggttttgccgttcaccttcagtgtcaggggcattatctctggcgcgggtgtagctgccggaacgcttgccgccagcgtagaatgaggataaaccacggcggtcgccgctgttgcggcgctcactttaatcagatcgcgacgggtcaaacttaaatcgtgcggctcgtgcttcccaacccgattatcttcggggtattcgccttggttgctcataccaggcctccggtattctaaaggggaaaataagagtgcgttgcgagagtgctgatgcttttttaaatgttaagcatagtcggcgacagcaggaggattattcttaaaacgcgaatgcagctatgagcccggctaataaattcatgttcgccgggatgttgatgatgatgggagctggtttattgctttagttgtacgatgcaaaaaccaataaggaaacctgtgattttcagctctgcatcaccctgcaaatctctgtcacttttaatataaaaatagggagaaatgatggagcttatattcattggcgattaggaaaccatcttgttatacaaaacaatacagttctttacatttgccttgttttatgaatactcctgaagaggtgtataacataatggtacaagcagggtagatatgaatatatttgaacaaactccaccgaaccgcagacgttatggtcttgctgcattcattgggctgattgctggcgttgtttccgcattcgtgaagtggggggctgaagttccattgccgccacgtagcccggtggatatgtttaatgcagcgtgtggcccggaatcattaatcagggctgcaggccaaattgattgctcgcgtaattttctcaatccaccgtatatttttcttcgagactggttggggctgacagatcccaatgcggctgtttatacctttgccgggcatgtctttaactgggttggtgttacgcacattatcttttcgatagtgtttgctgtcggttattgtgtggtcgctgaagtatttccaaaaattaaactctggcagggcttactggcaggtgctttagcccaactttttgttcatatgatttcattccctctcatgggactgacgccacctctgtttgatctcccgtggtatgagaatgtttctgaaatttttggacatttagtctggttctggtctattgaaattattcgcagagatttacgaaacagaattactcatgagccagaccctgagatccctttaggctcaaacagataatgcattgaatgataaaaatggcgcaaatacagcgccatttttataggttaaaaacattgctttttatattctgatgcagatagtcagtgagtatatcgcgctacttcaggatgatgtagatccgaagaacgctacagaagagaggcattgttgctggcaaatagaagaagtatcgggttttgttacccctgaaaaacgaagccccgctattatcgctggcggggcagtgcaattaattattgtatgtttataacggtgtcagcccgtatttagcccttgcacgattgcaagcctcattgacgactccgttctcaccagacatggcgaattctctgcatgtggacgatcgatttttatatatcgtgcagcaggcatttttgcccggggttcctgcaagggcaatacatcgggggtttttctgattggtaccgctcatgcatcggtgaaaaggggatatttgttcagtgagcctggcgggaatagtaccgccagcatcgtcggcttcggcccagtaaaaagagacgcggaaaaatgcacaacaggcaccacacgtcatgcatggattcagattgctcataattcaccagtacagctaaaaatcgtaaagagaacagcggtacatcgtatgtaagaacgtaccgcggttggctggggaactttcgatagtgtgagtattgaatgatttccagccgttaccgattttacgtactaattcgtgattaaaccactcgttagcaggctgcctgatacctttccgtgtctcctgaacactatggtgtgcatatgagaaagcccatcgttacaggtgacattgacgatcgcttccacatcatttaaacgatttttggagctctgaggtggaattcttccctcgaccgatggataagtcttagtccgccgaagggggcttagccggacaggaatcgctaatcttaatgaatttgtcgttatagaccagataatgattccccggctgacgtaactcaggctgatgaaccacgtctcccggacgtagataccaggcatcgccttcctcttcggtcgaatcacatcctggcttaatcagtagcttaaaccatgtgttgccagtgttacttaccgttcctgtcaccttgtcgaaggaccatttaaactgaacctgacgtggtcgtactaccagaatggtatccatcaccaccaccggctccgtgctgacctcgccgccggttgggctacgtcttgtctggttacgagtggggacttcgcgaaatgagacccggtagtagcgctcgcggttatcccgtggaccatgatagtaaaatttaaaatactcgctctcaccagcctgcaacgccagttggcggggggcgaaaagcagttcaccatccaccggtcgggtgcgcaattcactgctgcccgggctatcaatagcactgatggcaatacggtatatccgtgcgcttttgttgttattcactacacgtttgctgacaaagtcagtctcggacggcagcgaaaatgtcagattgccgaccgaaatcgcctgtgtcaaaggtgccgccagcatacagaccgctgtcagcagggccttagttaatgttacgccacgtcgcctgaacatgaatctctcctgaagcgctgacttcgccaaaccagccgttatcatctaccgtacgcagcgaaatggcgttatccattggaatcgaaaatttgactgtggtcttatccatctgccccacttcgccagagatatcagtccacggtgtggtcaaccacagcgcatcggtcatatcccgccagctatcatcgcacccggcatcgtaggtttttgtagctccgttgcgggtaataaaggaaagtgtcgccgggaacggtactttcgccttaccgtcatcggagctgaagacacaataggagcgcccgccaatcacctgcgcgggtccggtcaccttgatcagcacttcgtcggcagctgttttaccgctggtggttacgatatagccgaaatcgagtgccgactcgccgctgccaacatatccctcccgcgacggtgtctgagtatattcatcggagataatactgatgctgaaatcacggggtttgataatcagcgtgttggaggtagaaaattcataccagccagactccggtgatgtggtgttctgaaagcgaaagttgaatagatctttggtgttgatatcgctgatcccgaggttcaccatctgcttaaagaagttgctcgagaagaaaacatagatcgagtctgcgctcttcatctcgttgaaggtgtagtaataggcggtattgctcaccggtttccatgaactgccattcagactgaactgcatatcgtacgccccgacggccgaggctaacgacgagttggcgatcgccgggaatatatggattgaggtgttgctgagtccgtttgtttgcagggtatagttgaccatcttacaacttaatcctgaaaggctgccgatggtctgtgtccggcagtcggcgttcccttcgcccagagtcggtactccgtcgctgttgataaatacctccgccagcgagtgggtatttattaaccgcagatttgctgctttcgtatgggtgacgttgcgaacataccagttgccggaggcctgatccttacagcgtgcgccgctgctggcgtcatagttcacagaggtctggcaggcattgatggtcattgtaaagctgctgccgacgggcatttgttgcagatactggtaaaacgcgtctgacaacatgccgtgcatccacttcgcgccgccgctggtcaccgtcgcgccataaaatccactggcgtcggtggtttgcggcaggataagactggtggtcatattacacccagcgtaccagttgatgcagcgcaagccagttaaaggagatgaaactggtgaattttccagccacatatcaaacttccagttggtataaaggccggtgttgtaaccgttatcaatgtagccgaggctttgctgatagatggttcctgaaccagtgtattttaaaccggtccagcggttggcaccggtcaggcgcggatccagcgccccgccaggagtgacgaaaaagttgtcgtctgagttgttttcgacaaacacaaactcgcgtgccggtgcatccgcccaggttgttttgctcactgccgctctgagctcagttactggccagattagcgcgaaaattatcatcgttattagtaggttaactctcattctcttctcctgtctgcgtcaccgccgcccacgatgagaggccgctgcagaccacatcaccgacccagacggcaccgcgcgcctggttgagttccagtgccacttcgcaggttttattgccactgtagcgaaaatcgatagtgggatatttcttatccacgtccatgacaaactcgccgttttcatcggttcgggttcggccgatatggttgttaatccgtgcgttagccagcagtgtgccgtcttacgaacggatacgaccggagacggtaaccatctgcttcacctctggctcaatgacagcgacattgcctggatagagagtcagatggcttttgcggccgctgacgatatcgtagctgtcgagtgagtttttgctgttctgtaactccacctcatatcttccatagggagagagcgggagatagttacgcttgccgttaagcgggaaaatccgcccgttgattttggcgctgatctgaccgtcgtcctccagcccggtgttgaatatcaccccagcgttgccatcagtccgcccgctggcagcgatgtttttaccctgccagccgacgctgccattggcggtcaagttggtattgatgtagccgtccgccgcgctattgacgttcagcgttccgctggcgtaacgagcgtcgaactgtgcatacgccccaccgctgagggttttgtcatcaccggtatcgccggagatggcacgtgacagattggcaccaacagtgcgaatggttccttcatcaaactgtttgcgtgctgacaggtttgccatggtgtagccgttttgatgggtcatccctgcgctaaaccagttgcccagtggtagcgagagatcgagagcgatatatttccctgtattggcgttgctgtcgccgttgttatagcgctgaataccggcccgcaggccaagcgaaccaaaggtaccgctgtagacattttgatagtaatctgccgtgtaataatggctgttgtaacggcggtcatcattgtagctgatgctgaatgtgcccagcttcgaccacagtgagttcaggttgagtgtgccgccgattgcacggttatcggcatcgctacgtcgcaattgattgccaatgcgggttttttcctgattaacccacagcgaactaaagcctcccggtagagtggcg

SEQ ID NO: 272 - DNA, 14723 bp, Escherichia coli
  source 1..14723: mol_type = genomic DNA
tgaataattcattcagtagcgcgttatcctctttttgctccgtcatgaagcccagtttctgccgcatccgttctccataatgcgtcaacaaaacctgctgatagctgtccagggcctcattcagggcatctacggcaacaaatggcgacaatgtctgcgccagacgctgtaaattccacaacgcgacggcaggttgattatcaaagctgtaacgcccttgatgatccgagtgattacaaataaaaccgggttcgtaatcatcaagaaaaccaaacggcccgtaatcaagcgtcagccccagcagcgacatgttgtcggtattcatcaccccatgagcaaagccgaccgtctgccattgggcaattaacgacgcggtacgtgcgacaacatcgctaaaccagagacggtatttgtcctcatcatcttcaagatgtgaccagtaatgacgaatagcaaagtcagctaactgacgaaccttttccgactcgcggcggtagtaaaaatgttcgaaatgaccaaagcgcagatgacttggtgccacacgcatcagcatcgcgcctggctccgccgtttcccgatacactggcgaatcgctggtgacgatacttaacgcgcgggtcgtcggaatgcccagataatgcatcgcctcactggcgagactttctcgtatcgtcgaacgtaaaaccgcccgtccatcacccattcgcgaataaggcgtcaggccagcacctttcagatgccagtccattgtagtgccatcagcaagcagttgttcgccgagtaaaatgccgcgcccatcacccagttggcccgcccagacgccgaactgatgaccactgtaaacctgcgccagtggtgacataccaggcagtagggcttcgccgccccagacacctgcgccatttttaaacagcgacgatggaatactcagcgtgttagccagttcggtattatgccaaatcagccgggcattatttaaaggcgtaggggaaagtgctgtataggtttctggcaattcatcgcgccagcgggtaacaaaagacagggtcatagatcctcctgtttgatagtgtagacggttactctcgtcttaaacaccagcaaacagaagggttatcgctgaaccaacgtcgttatctgatttatgggaacggcaggccacaggcatccctggagagcatggaaatcgaagggggtaatctgtgccaatatttctgccgtatcaatgcctcccgcaatgatgcaattgcaacaaggggaaatttgcgcctggatcgcacgaataaacggttcgaaggagcggtgcgtgatttgttgctgaataaaacttttatccagcatgacgcgggtgaaaagaccatcaaaaaccgctttcattgtgctattgcctgctcccaaattacctaacacaaggggatacacttgcgataaggataaaagaccgcgattatcttttccttcattgagatgcgggtaattctcattaatcaacagttcaataaacggatattttaatagttcgcctgcgtaattatccctctctaataataatgtagccacttgtggcgttaaattaagccaggcaaagaggttgtgtttaataaaaaaatgttggcgtgattttagtaattccaactgctctgaaaataattgccaatgttgctcctcggtaagttgcgctataacccgactcgtcgggatacgcaccgtgccatcttcactggagaaatgggtaattaactcaacgccgacaaggacttgctggttgtctcttatcggcaggaaatagcaatcagaatgataaagattctccaaaaaaatcttcatggtaaccgtccctctcgaaggatgtttttcagtatccggctaaaagggatgaggccataagacataataattacagaaggagtaactttcatttgttccatgttaaccactttttcaggggtcctttttttagattatcctgattataaacgaataatccatttacggaatttttgtctgcaaaatactactgtattcaggagtaaatggacggcgatgtatcatcgccgtccatttttcgacatactagattcgtctcgcctgccagaaatttttctgccaatagacattatcaagtgaggaacgcatcactcccttgctggtagaggcgtggataaattggttgttggtatcgtaaatacctacatgcaaaccattttgtccggaccccgttttgaaaaagaccaggtcacctggcagcaactcgtctttatcaatttgcgtgccaatagaggcttgttgtttggtttcacggggcagctgcaaatcgaaacgatcgcgcatcgtcacaaccacaaatcccgaacagtccacaccgcgccgcgtcatgccaccatcacgatacggcgtgccatgccagctttgtagctggtcgttcaaaccggcaataacggtaatcgaatcagaaagtctggcatttggcggcggtgctttatggtggctacacccggccagaagcagtgctgtgatcaaaataaggcagaaacgcattccgtacggttcctctgttttttattcttgcattaatttagcgtcgtaattacccgattttcaagatactaatgaaatcagatggtcgaaatcagcattctgtgaccttcgatatccagacggcgaaaattcatcccataggcctgcgccagatttggcggcgtgagcacctcttccctgcgtccactggccagcatttttccaccttttagcaaccacgcccgatgcgcatgacgcaatgtgtggttgagatcgtgactgctcatcacaatcgccagtccttgctgacacagtgcgctcagaattttgtctaacgcactttgttgcgcaacatcaagactgttcatcggctcatcaagaagcagcaattggcctgcgggattggcttgtggtgtgatttgcaacaccaccgcagcaagacgtacgcgttgccattcaccgccggaaagttgattggtgctacgtccgagtttgtcatcaagagccagcgcccctgcgacatcattcagtagttcggtacgcgttttatcgtgctgatgcagtgtcaggtagtgccagaccggcattgcaaacggcggcgtctgctgttgtgaaagataggcgcgatgcagcgcgagttttgttgcggaccatgcttccagtggttgccccgcgaactgaatgcttcccttaccgctggtcattccggccattcgcgccagtaaggtactcttacccgcgccattcggccccaccaggtgcaggatctccccagcccgaacctcgccagaaagcggccccaggcgggtagtttccgcaacatcctgtaactgcatcacaatagacattattttgccaacgccagtttaatgctttccatcacaatgggatcttcaggcgtcatatccggggaaaaacgctggatgaccaacccgtccctgccaactaaaaatttctcaaaattccataaaatatcatcagggtacagcggtgcacgacctttgctgaccatacgggcatagaatccgctctcttccggcgcgactgcggtcggcgctgcggcaatcaatttttgatacagcggatggcgtccttcgccattaacttcaatcttactgaacatcgggaacgtcaccccccatgtggtggtacagtaagttttaatctcttcatcgctgcccggttcttgttccagaaactggttgcacgggaatcccagcaccacaaaacctcgatcggcccaggctttctgaatattctccaactgctcatattgcggcgttaagccacactttgaggcgacattgacaatcaacagcacattaccagcgtacttctccagcgtggtcacttcaccgtcgatatctttcactacggtcgtcagaatggaatcttgcatcgtttctcctgggtgtggtcagtaaaaatcttagcttttaatcatagaccgtctttttgcggctaacgtcttgcttttaacaataaccagataaacaccggcgcacccaacgttgcggtgaccacgccaataggcagctctgcggcagctaatgccaggcgcgctacaatatcggccagcagcaatgcgctcgcccctgccagcgcgcagccgggaagtaatacgcgatgatcggttaaaccacacaaccgaagaatatgtgggatcaccagaccaataaagccgatagcacccgccagcgccacactgacgccaaccatccagccggtcgcggccaccagcacattgcgccagaaccacaggggtaaacccagttgccgcgccgagatctcgccaagtgctaacatattcatcggcctggactgacaacagatccacaacaacacggggatcaatgccagcatcagccagctttgccgccagtctacgccgccaaaaccgcccatcatccagtacatcagctgacgtaaatcaacagaggtggaaaagtagatagcccacgtcattagtgcgctacagataatccctaatgcaacgccagccagcaataaccgactggtcgaaagatgacgacgggcgaaacgtaagagtattaaagtgatgataagcgcgccagcaatcgcacacagccctagcgcccagttggggagttgcccttgcccaagcaataccgcggcgataagccccacgcctgcgccgttagagacgccaagtagtccaggttctgccagaggattttcaaacaacgcctgcattacagcgccggatatagccagcgccgcaccaaccagcaatacagccagcgtacgtggcaggcgaatttgccagacgaacagttcgccacgaggagtaaaccagtcacctggcgagatccattgttcaccggcgcaaaggcttaagagaagcgccagcagcatcaaaactgacaggcataataaccagcgaatattttgtcgctgttgttggcgggcaagtgtcagcatggtatccgttctgctgaagtgtcatggcgttgattttacggtgactcttcgacagtgaaaagaaaaaaggccgcagagcggcctttttagttagatcagattactcgtctttgggcgaagcgttttcgacccggctttttaacttctgcccgggtctgaaggtcaccacgcgccgtgctgtaatgggaatatcctcgcccgttttcgggttacgtcccgggcgttgattcttatcacgcagatcgaagttaccaaaaccagagagtttcacctgttcgccgttttccagagcgcgacggatctcttcgaaaaacagttcaaccagttctttggcatcccgcttgctaagcccaagcttatcaaacagatattctgacatttcagcttttgtaagcgccataggttcaatccctcaatgatgcctggaatcgctcttttaatgcctctacacatttggcgacggtagcggcaatctcctcttcttcgagtgtacggctggtatcttgcaggatcaggcttatggcgaggctcttatacccctccgcaacacccttaccgcggtacacgtcaaataagtttacgccaactacctgatttacgccaactttcttacattcggataaaatatccgctgcgggaacgttttctgcgaccaccaccgcgatgtcacgacggttcgccgggaagcgagaaatctcgcgcgcctgaggcaccacgcggtctgcgagcttgttccactccagttcgaacaccagagtgcgaccgttaagatccagtttacgttccagttcaggatgaacaaccccaacaaaaccaatacgttcacctttcagataaatcgctgcggattgccccggatgcagtgccggattcgcttctgcacggaactcaacctcattcagtttaccggtcaggtcgagaacggattcaagatcgcctttcaaatcatagaaatcaacggtctcttttgccaggttccagtgctcttcgtaacggttaccgcaaatcacaccggctaacatcagatcctgacgaatgcccaacggtgcctgagtatctggtacgaaacgcagaccgctttcgaaaatgcgcacacggttctgctgacggttctggttgtacaccacggttgccagcaggccggtccacagagaaagacgcattgctgacatttcaacagagatcgggcttggcagcagtaaggcttcaacgcctggatggatcatctgctgcactttcggatcaacgaagctgtaggtgatcacttcctgatagcctttgtcgttgagcagcgttttcacgcgcttgagcgacaggtcagcttcacggtgagtacccataatcaggcttgcctgtaccggctcatccgggatgttgttgtagccgtaaacacgcgcgacttcttcgaccagatcttcttcaatctccatatcgaaacgccagctcggcgcaactgcctgccactcgtctttgccttcggtcacttcgcagccgagacgacgcagaatgtcagttacctgctcatccgcaatatgatggccgatcaggcgatccagtttgctacgacgtaaagtgatggttgcacgcttcggcagcgttgcttcgttggtgatatcaattaccggaccagcctcaccaccgcagatgtcgatcagcagacgggtcgcacgttccatcgctttgtgctgcagtgccggatcaacgccacgctcataacggtgagacgcatcagtatgcaggccatgacgacgagcacgaccggtgatagacagcgggctgaagaaagcgcattccagcaagacgttttgcgtttcgtcattcacgccagagtgttcgccaccaaagatgccgcccatcgccagcgccttgttgtggtcggcgatgaccagagtgtcagcattcagcttcgcttcagtgccatcaagcagtaccaacgtttcgccctctttcgccatccgcaccacaatgccgccttcaatgcgatctttatcgaaagcgtgcatcggctggcccagttcgagcagtacatagttggtgacgtcaacaactgcatcgatagaacggatcccgcaacgacgcagtttttctttcatccacagcggagttggcgctttaacgttaatgccttttaccacacggccaagataacgcgggcaggcttccggcgcttcgactgtaatcggcagcgtgtcgtcgatggtcgcaccaaccggaacgatttccggttcaaccagcggcagctgattcagcacggcaacgtcacgcgcaacaccaatgatacctaaacagtcggcacggtttggcgttacgctgatttcgatggtgttgtcatcgagtttcaggtattcgcggatgtcggtgccaatcggcgcatccgcaggcagttcgataatgccactgtgatcgtcagaaattcccagctcagaaaaggagcacagcatcccttcagacggttcgccacgcagtttcgccgctttaattttgaaatcacccggcagaacagcaccaatggtagctaccgccacacgcaggccctgacggcagtttggcgcaccacagacgatgtccagcaggcgatcgccgccgacattcacttttgtcacacgcagtttgtcagcgttcggatgctgcgcacactcaaccacttcaccaacgaccacgccgtggaagctaccggcaaccggttctacaccgtcaacttccaggcccgccatagtgatttgattcgccagcgcatcgctatcaatcgccgggttcacccattcgcgtaaccacagttcactgaatttcataatctattcctgccttatttaaactgtttgaggaaacgcagatcgttttcgaagaatgaacgcaggtcggtgacgccgtaacgcaacatagtcagacgctccatccccatcccgaaggcgaaaccagagtaaacttccgggtcgatgccaacgttacgcagcacgttcggatgcaccatcccgcagcccagcacttccagccatttaccgtttttacccatgacgtcaacttctgcagaaggctcggtaaacgggaagtaggaaggacggaagcgaatctgcaaatcttcctcaaagaagttacgcaggaaatcgtgcagagtgcctttcaggttggtaaagctgatgttggtatcaacaatcagaccttccatctgatggaacatcggcgtgtgagtctggtcgtagtcgttacgataaacgcggccaggcgcgatgatacgaatcggtggctgctgggctttcatggtgcggatctgtacgccagaggtctgggtacgcagcaggcgggtagtgtcaaaccagaaagtgtcgtggtcagcgcgcgccgggtggtgaccaggaatgttcagagcatcgaagttatgataatcgtcttcgatttccggcccggttgccacggtaaagccaagctcaccgaagaaactttcgatacggtcgatggtacgggtaaccggatgcagaccgccgttttcaatgcgacgacctggcagggagacatcaatcgtttccgccgccagacgcgcattcagcgctgcgctttccagttccgctttacgcgcattcagcgcctgctgaacctgctctttcgcttcgttgataaccgcaccagctgccggacgctcttctggcggcagctcacgcagggtcgtcatctgaagggttaagtgcccttttttacccaaatattcgacgcgcacattatctaacgcggcaacatctgacgcctggctaatggccgccttcgcactggcaaccagttctgcgagatgtgacatggttttcctcattgtgtcagtggtgacactggttcgttggacttagagcctatcccatcaggctattttacttgccattttggtcccgggcagtgctcgaaattctcacgtacttaaatacgctccggtttctccgcgctggccgtgtccagactggctgcgacaattacacctgatgagacaggctttttattttgcaaaacgcgcatacaaaaaaagcctccactgggaggctttcaggcgctgttttccgtttctcttctcacgcgctagcctcctggattcaggtgctaaagtaaaaaaagaagcggaaaatagcagcattcattgcttgcgttaccttttggtactcttcaaaagacctttattgaaaaggctacggcgataaaagtcaatgttttgatggcgttgaaacgaaaagagggagactagctccctctttcaactggcttatgccagagctgctttcgcnnnnnnnnnngcggtgaacgctactttgtcgaatactgcgatatcagccaggatcttacggtcgatttcaacagaggcttttttcaggccattgatgaatttgctgtaagaaataccgttctgacgtgctgctgcgttgatacgcgcaatccacagttgacggaactgacgcttacgttgacgacggtcacggtaagcatactgaccagctttgataacagcctggaaggcaacgcggtatacgcgagaacgcgcaccgtagtagcctttagcttgtttcaaaattttcttgtgacgtgcgcgtgcaataacaccacgttttacgcgagccatatgtgctctcctgtatctatattctaattaaaaagttaaaaacgttaacggcttatgcgtacggcaggcacgcgattaccaggcccagatcgcctttggaaaccatggctttcggacgcaggtgacgtttacgtttggtcgcttttttggtcagaatgtgacgcaggttagcgtgcttgtgcttaaaaccacctttaccggtttttttgaagcgcttagcagcaccgcgtacggtcttaatttttggcattttaataacttccacttcgcattgttaataaacgaaacaaaggcgaacaaagcctgtgaagcccgaaggctccacagacagtgctacttgaaggccttactgtttcttcttaggagcgagcaccatgatcatctggcggccttcgatcttcgttgggaaggattcgaccactgccagttcttgcaaatcgtctttcacgcgattaagcacttccataccgatttgctggtgcgccatctcacgaccgcggaaacgcagcgtgattttggctttatcaccctcttcgagaaagcgaatcaggctgcggagttttacctgatagtcaccttcatctgtaccaggacggaatttaatttccttaacctggataactttttgctttttcttctgttccttagaagacttgctcttttcatagaggaatttgccgtaatccattatacgacaaaccggcggctcggcgttagggctgatctcgactaagtctactccggcttcttctgctttctccagagcttctctcagactcacaataccaagctgctcgccttccagacctgttaagcgaacttcctgggcgcgaatttcgccattgatacggttagggcgcgccgtttgaactcgttttccgcctttaataccttattcctccaattgtttaagactgcggctgcgaatctcttgttgcagcttctcgatcacttcatttacgtccatgcttcccaggtctttaccacggcgggtgcgaacggcaactttgcctgattccacctctttatcaccacagaccagcatatatgggacgcgacgcaaagtgtgctcgcggattttaaagccaatcttctcatttctcaagtctgctttaacacgaatgcccgcatttgatagtttttgcgtcaattcgttaacgtattcagactgtgaatcggtaatattcatgataacaacctgaactggcgcaagccaggtcgggaagaaaccagcgaattcttcggtcaggataccgatgaaacgttccatcgaccccagaattgcgcggtgaatcattaccggtactttacgttcattgtcttcgcctacataagaagcgctcagacgagaaggcaaagagaagtccagctgtactgtaccgcactgccatgcacgatcgaggcagtcatacagggtaaattcaattttcggaccgtagaaagcgccttcacccagttgatattcaaacgggatgttgttttcttccagcgcaaccgccaggtccgcctcagcacgatcccacatttcatcactgccaatacgtttttcaggacgagtggagagtttgacgacgatcttctcgaacccaaaagtgctgtacatatcatagactaaacggatacatccgttaacttcatcgcgaatttgttcttcagtacagaagatatgcgcgtcatcctgggtaaatccacgcacgcgcatcaggccatgcagcgaacctgacggctcattacggtggcagctaccaaactcggccatacgcagcggcagatcgcgataagacttcagcccctggttgaaaatttgtacgtgacccgggcagttcatcggcttaatgcagtattcacggttctcagaagacgtggtgaacattgcatctttgtagttgtcccagtgaccggttttttcccacaggacacggtccatcatgaacggacctttaacttcctgatactggtactctttcagtttagaacgaacaaacacttccagttcacggaagatggtccagccgtcgttgtgccagaataccatacccggcgcttcttcctgcatatggtacaggtcgagctgtttaccgattttacggtggtcgcgtttcgcggcttcttccaggcgctgcaggtaagcgttaagcgcttttttgtctgcccacgccgtaccgtaaatacgttgcaacattttgttgttgctgtcgccacgccagtaagcccctgccgttttcattagtttgaaatgatggcagaaacgcatgttcggtacgtgcggaccgcggcacatatcgacatattcttcatggaagtacagacctggcttgtcatcatgggcgatgttttcgtcaagaatggagactttgtagctctccccacggttggcgaaagtttcacgcgcttcgtgccagctgactttcttcttaatgacgtcgtagtttttctcagcaagctcatgcatccgcttctcgagtgcttcgacatcttcctgggttaacgtgcggtcaagatcaacgtcgtaataaaaaccgttgtcaataaccgggccgattgccattttggtatgcggccaaagttgtttaatcgcgtgccctaacaggtgcgcacaggagtgacgaatgatctccagaccgtcttcgtctttggtggtaatgatggacagttgtgcgtcgttttcaatcagatcgcaagcatcaaccagttcgccattaacgcgccctgcgatacaggctttcgccagacctggaccaatgtccagcgcaacatccatggggcttacagcgtggtcgtaatggcgttggctgccatcaggaagagttataacaggcattttatatccttatttgcagtggtgacccacacgaaagatcacatacaaagaaaaatttgtttattaacagttcattgcgaaaccatctagccaacaaatgctaaattggttcgcaatcaggtacacaaatgaaagacattaacctctcaccttccacccggttgagcgatgttaacactaaaaaaagggagattgtacctttccgtttcacattgattcgattcgcaattcgtttgtagtgagtacaccagcaaaacgcttaaagaaccactgataacatcacggtgcgtctgaaaggtttactgcgagcggatttacagcagcataaactgaatccagcaaagttcgttgcgtgatttggcggtagtattttaaacgctcatgagattaatgacgaagtggtcatatcacaatgataaaagtgacacaattcttataacaatttttcgtgcacatttcgttctggcgataataattaatcatcatcctcaaaacctccagatatatataaggcgaatagattatgagtcaaaacgatatcattatcagaactcattataagtctcctcatagattgcacatcgatagcgacataccaacaccttcatcagagcctattgataaatttgcgcgccagctcatcaccctacttgatacctctgacttaagttcgatgctgtcatactgtgttattcaggaatttaccgcaaactgtcgaaaaatatcacaaaattgttattccactgccctttttaccattaactttgccacttcacccatccatgcagaaaatatactcattacattacactataaaaaagatttcatttccttattactggaaaccacgcctattaaggctaaccatttgcgaagcatactggattatattgagcaggaacagttaactgccgaagatcgtaaccattgtatgaaactgtctaaaaaaatccatagagaaaaaactatacaaccaacagtaaatctcaatggtagtgcatgttttttgcaatctccttctgacgctattttttgtcgccatctgtcattgcaatacgcccttgattcattgagaaatggaaaaggcaaagtcaacctgattaaacattactcctccgttgaatccatacagcagcatatccccttagtccgggatgcggagttcagagcattacttcgccatcctcctgcagggagtcgcgttatcgcgagtaaggattttggcttcgctttagatattttcttttgtcgaatgatggcaaacaatgtcagtcatatgtccgcgattttatatatagacaatcatactttgtcagtaaggctacgaataaagcagtcagtgtatggacaattaaactatgttgtgtccgtttacgacccgaacgataccaacgttgccgtcagagacacccacaggacagcacgggcctttctttcgcttgataagttcatcagttcaggtcccgatgctcagacctgggctgataggtatgttcgcaactgtgcaattgctattctgcccctattacctgtgggagttccaggggctattttcgcgggtattgcatcacgaatgccatttgcccctatacatccatcggcaatgttgttaataatggctacaggccagactcaacagcttattacattattcaaacagttgcccatactccctgaaaaagaaatcattgaaataataactgcgcagaatagcgttggtacacctgctttatttttggctatgatgaacggacatactgacaacgtgaaaatatttatgcaagaaattcagtcactggtagataatcacatcattcatgaagataatctggttaaattactgcaaactaaaagtgctaacgaaacacctggactttatatctccatgttgtatggattcgatgaaataatcgatatctttctgaatgcattaaccactccaatagcacaagagcttttaaacaaaaaactggtgatgagtattttagccatgaaaatacatgatggtgagccaggattatacgccgcaatggaaaataatcaccctttgtgtgtcacacggttcctctctaaaattaatggcatcgcctttaaatacaagttgagcaaagctagcacatggaacccctgctttatacatcgccatgagcaagggtaataaagacgtcgtgttatcttatatatcaacactgagtacttttgcaaaaaaatattcttttagtcaacgtcaattattcacactgttggccgctaaaaatcatgaaaacatgtcagctgttcatatagccattcatcataatcattataaaactgtagaaacatattatgctgctattaatgcaatcagcc

SEQ ID NO: 273 - DNA, 14531 bp, Escherichia coli
  source 1..14531: mol_type = genomic DNA
caatttatttatccagatttaatgagaaatttataatgcgctatttcatactaatgttcactttcgtgtgttcctttgttgcagcccaaccaactattgtcccacaattacagcaacaagttacggatcttacgagtagcttaaactcacaagaaaagaaagaactgacgcacaagttagaatctattttcaataatacccaagtgcaaattgctgtattaattgttcccacaaccaaagacgagacaattgaacaatatgctacaagagtttttgacaattggcgtttaggagatgccaaacgtaatgatgggatactgatcattgttgcctggtcagatcgtactgtccgcatcaaggtaggttatgggctggaagaaaaggtaaccgatgctctggctggagatatcatccgtagcaacatgatacccgcatttaaacaacaaaaattagctcagggattagagctagctataaacgctttgaataaccaactcacttcacaacaccaatatccgactaatccttcagaaagtgaatcagcgtcttccagtgatcattattactttgctattttttgggtatttgcagtgatgttcttccctttctggttttttcatcaaggcagtaatttttgtcgcgcatgtaaaagtggagtctgtatttcagcaatctatcttttagatttattcctgttctccgataaaattttttccattgctgtattttccttcttttttactttcaccatatttatggtctttacctgtttatgtgtacttcagaaaagagcatctggtagaagttatcattcagacaacagcggttccgctggaggctcagatagcggcggatttagcggcgggggcggttcttctggaggtggcggcgcatccggccgctggtaactcaaccataaaaaatgccagcccggaggctggcatttttaaatcagataaagtcagtcttatgcctggcctttgatctctttacgaccgttgtacggtgctttttcgcccagagcttcttcgatacgaatcagctggttgtatttagcaacacggtcagaacggctcatagaaccagttttgatctggcctgcagcagtaccaacagccaggtcagcgatggtagcgtcttcagtttcgccagaacggtgagagataactgcagtgtagccagcatctttcgccatcttgattgcagccagagtttcggtcagagaaccgatctggttgaatttgatcaggatggagttagcgatacctttttcgataccttctttcaggatcttggtgttggttacgaacaggtcgtcaccaaccagctggattttgtcgcccagaactttggtctggtatgcgaaaccgtcccagtcagattcgtccagaccgtcttcgatagaaacgatcgggtactgtttggtcagttcttccaggaagtgagtgaattcttcagaggtgaacgctttgttgccttcgccagccagaacgtatttaccatctttgtagaattcagaagctgcgcagtccatcgccagagtgatgtctttgcccagttcataaccagcagctttaacagcttcagcgataacagccagagcttcagcgttggaacccaggttcggcgcatagccaccttcgtcaccaacagcagtgttcatgcctttcgctttcagaacttttgccaggtgatggaaaacttcagaacccatgcggatggcttctttcacagttttcgcgccaaccggctgaatcatgaattcctggatatcaacgttgttgtcagcgtgctcaccaccgttgatgatgttcatcatcggaaccggcatagagtatttgcccggagtaccgttcagttcagcgatgtgctcgtacagcggcatacctttagcagctgcagcagctttggcgttagccagagatacagccaggattgcgttcgcgccgaatttggatttgttttcggtgccgtccaggtcgatcatgatcttgtcaatgccagcctgatctttagcatctttgccaatcagcgcctgagcgatcgggccgtttaccgcagcaacagctttggttacgcctttacccaggaaacgggatttgtcgccatcgcgcagttccagagcttcacgggaaccagtagaagcacctgacggagcagctgccataccgacgaaaccaccctccagatgtacttcggcttcaacagtcgggttaccacgggagtcgatgatttcacgaccgatgatttttacgattttggacattaggttttcctcaagtcactagttaaactgaaactccagacaaacaacgcgtacccagggtacgcgttgccgctctaacttttttacttacttcgcctgacgtttctggaactcgctggcggctttcacaaagcctgcaaacagcgggtgaccatcacgtggagtagaagtaaactccggatggaactggcaagccacgaaccacgggtgattcggaacttcgatgatctcgaccaactgatcatccccggaacggcccgcaacgcgcagacctgcatcttcaatctgtttcaacagcatgttgttgacttcgtaacggtgacgatgacgctcaacaattgtcggcgcattgtacagctggcgaaccaggctatcgtcaaccaactggcactgctgtgcgccgagacgcatggtaccgccgagatcgctcttctcgctacgaacttcaacgttgccgttttcatcgcgccactcggtaatcagcgccacaaccgggtacttacagtctggcacaaattccgtagagttggcgttctccatgttggcaacatggcgagcgtaatcaattaacgccacctgcatacccaggcaaatgcccagataaggaatattgttctcacgcgcaaaacgcgcggtcgtaatcatgccttctacgccacgatagccgaaaccgccaggtacgaggattgcgtccagacctttaaggatttcaacgccgcgcgtttcaacatcttgtgaatcgatcagtttgatgttgacgctgacacgattcttcagcccaccgtgtttcagtgcttcgatcactgatttataagcatccggcagttcaatgtacttgccgaccataccgatggtgacttcacttaccgggttcgcttcttcgaagataacctgttcccattcggacagattcgcttccgggcagtttaagctgaatcgtttacaaatataatcgtccagcccctgagatttcaacaggcccggaattttatagatggaatcgacgtctttcagagaaataaccgctttttccggaacattacagaacaatgcaatcttcgcacgttcgttcgccggaacagcgcgatctgaacgacaaatcaggatgtcaggctggataccgatggagagcagctcttttacagagtgctgagtcggtttggttttgacttcaccagacgctgccatgtacggcaccagcgtcaggtgcataaacagagtgtgctcacggccaatttcaacagccatctggcgaatcgcttcgaggaacggcaaggattcgatatcacctactgtaccgccgatttctaccagtactacgtcatgaccttcgccaccttccagcacgcgctctttgattgcgttagtgatgtgcggaataacctgcacggttgcgccgaggtagtcaccgcggcgttctttacgcagaacgtcagagtagatacgacccgtggtgaagttgttgcggcggctcattttggtacgaatgaaacgctcgtagtgccccaggtccaggtcggtttcagcgccgtcttcagtaacgaacacttccccgtgttggattgggctcatagtacctggatcgacgttgatgtaaggatccagtttcatgatggtcacattgaggccacgggcttcaagaatggctgcgagggaggctgcggcaatgcctttacccagagaggatacgaccccgccggtcacaaaaatatagttcgttgtcatgctgaacctgagaagttaggttgaaaagacgatggaataaccaggacgggaaagcagtatacccgaacatgacctgtgccacaaactttcattatccctcctcttcgccagcgcactattgaaatcaggagtgagaaaatagcccctttggggtaaatgtttttgacgcaaatcaagcgcttgtcatttaaaaaatgacacaaatggcgcttgaccgcgtaattcccttagagatcaatttcctgccgttttacctgttgccagacttcttccattgtttcgaggtcaacacctgtcatttccagtccacgcgcggcaacaatacgctccacttcgcgaaaacgacgctcaaatttttcgttcgctttttgcaatgcgatttccgcttttgtccctaaatgacgagccagattgaccgtggcaaacagcaggtcccccatttcctcctccagtttagcctggtcgacaacagcctgccgcgcttcgtacatcacctcgtcgatctcttcgtagactttatcgactaccggaccaagcgtcgtccaatcgaagccaacgttggcgcaacgtttctggattttttgcgcacgcattaaagccggtaaactacgaggaatatcgtccagcgccgaatgctgcgctttctgcgcgcgctcttcggttttgatttgctcccaacgggcaagcacttcactactgttttcggcagaactatcagcaaaaacatgcggatggcgacgctctaatttatcgctaatagcagcgcaaatatcattaaagtcaaagcgcccttcttcctgagccatttgcgcgtaaaacaccacctggaatagcagatcgcccagttcaccgcgaagatcgtcaaaatcttcacgggcgatggcgtccagcacttcgtaggtttcttcaagggtgtaaggcgcaatggtggcaaatgtctgctctttatcccacgggcagccgttttccggatcgcgcaggcgctgcataatagtgagcaaacggtcgatttgattcattgaattgtcctgaaaattgcgggtctgtcaggtggaaacctgtgaccagaatagaagtgagttagtaacactacccaatcagtacgttaattttggctttaatgagttgtaattcctctggggcaactgttcctttcttcgttgctcctcttgcccgccaggcgatactttttacctgatcagctaacgctacgccatcacgttcctgaccggataaaacaacttcgaacggatatccttttgattgcgttgtacaaggaacacacagacacatacctgttttgttgttgtacatgaaaggactcaggacaacagctggacgatgtccagcttgctcgctaccttttgtcgggtcaaaatcaacccaaatcagatcgcccatatcgggtacgtatcggcttaccattaccagacttccttatctttcggctctccccagtcgatattctcgtggaggttttccggcgtgatgtcgttgaccagttcagcaagcgtaaatacgggctctttacgcactggctcaataattaatttgccatccaccaggtcaatcttcacttcatcatcaatattcagattgagcgcctgcattaacgtagccgggatccgcaccgccggtgaatttccccaacgctttacgctactgtggatcataaccctttcctcaaaccgctatcatatgtagatacagtatatatcaatctacattgtagatacgagcaaatttctgcctaactcccgtgcaaccgacgcgcgtcgataacatccggcacctggttgagtttacccagcacgcggcccagcacttgcaggttgtaaatctcaatggtcatgtcgatggtcgccagttgctgtttggtgtcgctacggctggcaacgccaagcacgttcaccttctcgttggcgagaatggtcgtgatatcacgtaacaacccactacgatcattagccaccacgcggaccaccagcgaatatccggcggagtagctctcaccccataccgcgtcaacaatgcgttctggcgcatgggagcgcagttccgccagttgttcgcaatcggcgcggtgtactgaaataccgcgtccctgggtaatgaagccgacaatctcatctccaggaatcggctggcagcagcgcgcgatgtggtgcatcaggttaccaacaccttcaactaccacacgaccgttatctttactgcggttttgcggtgtgtagcttttttgctgaagctgtttcagcgcggcggcgtcctgctcttcggcactcggcttattaaattgcgattgcaggaagttcaccatctgattgagacggatatccccgccaccaatcgccgccagcaactcgtcgacatcattgaagttgtaacgcggcaacagatgtttttctgcttctttcaggctgatccccagatgttccagctcgtcgtcaaggatttgccgcccagccagaatgtttttgtcacggtcctgtttacggaaccaggcgtgaattttcgaacgcccacggctggttgtgacgtaaccgaggtttgggtttaaccagtcacggctggggttcggctgtttctgggtgataatttcaatctggtcgcccatctgcagctggtaggtgaacggcacaatgcgcccgccaatttttgccccgatgcagcggtgtccgacatcactgtggatgtggtaagcgaagtccagcggcgttgatcccgccggcaaatcaacgacatcacctttcggcgtaaagacgtacacccggtcgtcaaagacctgactacgtacttcgtcgagcatttcgccggaatcagccatctcttcctgccacgcaatcagtttacgcagccaggcaatccggtcttcatgtcccgaacgtgcgccgccagcagccgcgccctctttatatttccagtgcgcagcaacacccaactctgcatcttcatgcatctgtttggtgcggatttggatctcaacggtttttccacccggccccagaaccacggtatgaatagactgataaccgtttggtttcgggttagcgacgtaatcgtcaaactcatccggcaggtggcgatagtgagtgtgcactatccccagtgcggcataacaatcctgtaaacgctcggcgacaatacgtaccgcacgaacatcaaacagctcatcgaaggcgaggttctttttctgcattttacgccagatgctgtagatgtgtttcggacgaccatacacttcggctttaacgccttcagctttcatctcagcgcgcagatgaccgacaaactcttcgatatagtgttcgcggtcgagacggcgttcatgcaacagttttgcgatgcgtttgtattcggtcgggtgcagataacggaagcagtaatcttccagctcccatttcagttgcccaatcccaagacggtttgccaacggcgcgtagatattggtgcactcttttgccgccagtacgcgttcatcttccggcgcatcttttacttcccgcagatgagcaatacgctccgccagtttgatgaccacgcagcgaaaatcatcgaccatcgccaataacatccggcgaacgttatcgacctgttcggaggaaacagaatcagtgtgcgtcgctttcagctggcggatcgccgccatatcacgcacgccgtgaataaggttaacgaccgacttaccgacgctctcacgcagcacatcttcgctgactacgttggcatccgccagagggaaaagcagcgccgcccgcagcgtgtcaatgtccatacttaatgtcgagaggatctccaccatctcaacaccacgccacaataacagactggcatccggatgcccctgcgtctgttgcagacaatacgcccaggtttcggctaagcactcacacgacttctggctggtaatacccagacttgcgatccatttttccggatcaaattcaccagccttattgatatgtgcacttcttaccgcaaccatcgtcctctcctttagggaccagacctgccgaaatcggcaaatcgcaactatttaacgcgcgagaaaagtaccatcgattccagatgtcccgtgtgtgggaacatatccagcatcgccagtcgcgcaatggtatatcctgcttttaataacgcttcgctatcccgagccagcgttgcagggttacaggatacataaactatacgaataggttccagttttataatttgctgcataacacctgcggcacctgctcgcgccgggtccagcaacactttatcgaagccgtttttcgcccacggctgctttgtgacatcttcttcaagattttcgtgataaaacgtcacattctgtaagccattaagacgcgcattctgctggcctttttccaccagcgccggaacaccttctacaccgaccacactggcagcttgtgtcgccaatggcagtgtaaagttgcccataccgcagaacagatccagtacgcgatcttcaggttgcacatccagccattccaacgcacgcgctaccattttttggttcacacccgcattgacctgaataaaatcgcgcgggctaaaagttaagcgcaacccgtttgagtcataccagggcatctcaccagagacggtttcgagtatctcactatcgggggcgagatacagatccaggccttcagaatgcgaaaagcgttccagtttttcgcgatctgccgaacttagcggtgcggtatggcgcaaaatcatcagcgtgccgctggttgcctgtaccagttcaacatgaccaagatggcgcatagcttgtaagctgcccagacatgccctgactttgggcagcaatgcttcaagttggggcgctaaaatggggcattgtttgacgtcgacaatgtcactggagcccgctttgcgaaaccccatctgaagttgctgtgttttcggtaagtagttcagacttaaacgcgcgcgacggcgatagccccagggaacatcggcgatcacttcagagacatcgtgtttcattaatcgggcgagtgccgcacttttgcttcgctgctgtaaatccacgctggcgtgttgttgctgacagccaccgcatacgccaaaatgaggacagcgtggcgtttcgcgttccgggctatcgcttaaccggcgtacgactttagcgcgggcatactgttttttatcttcagtaacagtaacttccgcgttttcctgcggcaataatccggggataaatagcgttttgccgttatgtcgcgccacgccctgaccaaaagagtcgaggtcgttgactgaaacggttatgatctgacgcgtcgtcgtgcgtcgttttgcagagtagaattgcgccattggcgagactttctcaatttaacagtgtgaccttaattgtcccataacggaactccatgaccaactacagcctgcgcgcacgcatgatgattctgatcctggcaccgaccgtccttattggtttattgctgagtatctttttcgtcgtgcatcgctataacgacttgcagcgtcaactggaagatgccggtgccagcattattgagccgcttgcagtttctactgaatatggcatgagcctgcaaaatcgcgaatctatcggtcagttaataagcgtactgcatcgtcgccattccgatattgttcgcgcgatttcggtttatgatgaaaataaccgactctttgtcacctccaattttcatcttgatccctcatcaatgcagctcggcagcaacgtgccgtttcctcgccagctcactgtcactcgtgacggcgatattatgatcctccgcacgccgattatttctgagagttactcccccgacgaatcgcccagtagcgatgccaaaaatagtcaaaatatgttgggatatattgcgctggagctggatcttaaatcggttcgcttgcagcaatataaagagatctttatttccagcgtgatgatgctgttttgtatcggtattgcgcttatttttggctggcgcttaatgcgcgatgtaaccggtccgattcgcaacatggtgaataccgtcgaccgcatccgtcgcgggcaactcgacagccgggtggaaggatttatgctcggcgagctggatatgctgaaaaacggtatcaactcgatggcaatgtcgctggctgcttatcacgaagagatgcagcacaatatcgaccaggcgacgtccgatctgcgtgaaacgctggagcagatggaaattcagaacgttgagttggatctggcgaaaaagcgcgcccaggaagcggcgcgtattaaatccgagtttctggcaaatatgtcacacgagctgcgtacaccactgaatggtgttattggctttacccgcctgacgctgaaaacagaattaacaccaacgcagcgcgatcacctgaatacgattgaacgttcggcaaataatttgctggcaattattaatgatgttctcgacttctcgaaactggaagcaggtaagctgattctggaaagtattccattcccactacgcagcacgctggatgaagtcgttactctgctggcacattcttctcacgataaagggttggaactgacgctcaatattaaaagcgacgtgcctgataacgtgatcggcgacccgctgcgattacagcaaatcatcactaacctggtggggaatgcaattaaattcaccgagaatggcaacattgatattctggtagaaaaacgtgcgctgagtaataccaaagtgcagattgaagtgcagattcgggataccggcattggtattcctgaacgcgatcaatcgcgcttattccaggccttccgacaggctgatgccagtatttcccgccgtcatggtggcaccgggctggggctggtgattacacaaaaactggttaatgaaatgggcggcgatatttcgttccatagccagccgaatcgcggttcaactttctggttccacattaatctcgatctgaacccgaacattattatcgaagggccatccacccagtgcctcgcaggtaagcgcctggcctatgtcgaaccaaactccgcagcagcgcaatgcacgctggatattttaagtgaaacgccgctggaagtggtttatagcccaacgttctccgcgctgcctcccgcgcattacgacatgatgttgttaggcatcgcggtgaccttccgcgagccgctaacaatgcaacatgagcgattagcgaaagcggtatcgatgaccgatttcctgatgctggcacttccttgccatgcacaagtcaatgctgaaaaactcaagcaagatggtatcggcgcgtgtctgctgaaaccattaacacctacacgcctgttgcctgccctgacggaattttgtcatcacaaacaaaacacgcttttgcctgtaaccgatgaaagtaagctggcaatgacagtcatggcggttgatgacaaccccgctaacctgaaacttatcggcgcattgctggaagatatggtgcaacatgtggaactttgcgatagcgggcatcaggcggttgaacgggcgaaacagatgccgttcgatttgatcttaatggatattcaaatgccggacatggatggcattcgggcctgcgaactcatccaccaactcccgcatcagcaacaaacgccggttatcgcggtaacggcgcatgcaatggccgggcaaaaagagaagctgcttggcgcagggatgagcgattatctggcgaaaccgattgaagaagagcgattgcataatttgttgttgcgctacaagcctggcagcggtatttcctctcgcgtcgtgacgcccgaagtcaacgaaattgtggtgaacccgaatgcgaccctcgactggcaactggcactacgccaggcagcaggaaaaaccgatttagcgcgcgatatgctgcaaatgttactcgatttcctgcctgaagttcgcaacaaagttgaggaacagctggttggagaaaacccggaaggcctggttgatttgattcataaactgcatggcagttgcggctatagcggtgtgccacgtatgaagaatctctgccaactgatcgaacaacagctacgtaacggtactaaagaagaagatttggaaccggagctgctggaactgttggacgagatggataatgtcgcgcgcgaagccagcaaaattctcgggtaatggatgtcttgtcgagtagcaatcggctttttatgacgctggtttcagattggtgacaaagtgcctgtgtttatgccggatgcggcgttaacgccttatccggcctacaaaaccaattaaattcaatgaattaaaaaatgatgtagacctgatacatagcacaacaggctattttgcgtttagcatcagtctcaaaccggctccagatagagccggttttggttttctgtcttaacgcaccatgcacgggcgcttgttatcgaacgtccagccaggaatcagatactgcattcccatcgcatcgtcacgcgcgccaagcccgtgtttctgatacagctcatgggctttcatcacttgatccatatcgatttctacacccagccccggtttttctggcacctgtaccagcccgcctttgatctcaaacggttctttggtcaggcgctgattgccttcctgccaaatccagtgcgtatcaatagcagtaattttacccggtgcagcggcggcaacatgggtaaacatcgccagggaaatatcgaagtggttgttagagtgtgaaccccaggtcaggccaaattcatggcacatttgcgccacacgtaccgaaccttgcattgtccagaaatgcggatccgccagcgggatatcaacggattgtaacgagagcgtatggcccatctgccgccagtcggtggcgatcatattggttgcggttggcaggccagttgcgcgacggaactctgccatcacttcacgcccggagaaaccttgctccgcaccacacggatcttctgcataagccagtgaccctttcaggtatttaccaattttaatcgcttcgttcagcgaccaggcaccgttaggatcgagcgtaatacgcgcctgcgggaaacgtttcgccagtgccacaatagactcggcttcttcttccccggccagtacaccgcccttcagtttgaaatcgttgaagccatatttttcatatgccgcttccgccaggcgcaccaccgcatccggcgtcatcgcttcttcatgacgcaggcgataccagtcgcatgagtcatccggctggctttgatacggcagcggtgtggctttgcgatcaccgacgaagaacagataaccgagcatttcgacttcgctacgctgttgaccatcgcccagcagcgatgccacgtttacccccagatgctgccccagcagatccagcattgccgcttctatcccggtaactacatgaatagtggtacgcaaatcaaatgtctgcaaaccgcgcccaccagcatcacgatcggcaaaagtattacgcaccagcgtcagaacgtttttgtattcacccagcgttttacctaccaccagcggaatcgcatcttccagcgttttacggattttctcgccgccgggaatttcccctacgccagtgtgaccagaattatctttgataatcacaatattacgcgtaaagaacggtgcgtgtgcaccactcagattcatcagcatactgtcatgacccgccaccgggatgacctgcatttcagtaacaacaggcgtcgtaaattgagaactcatatttatgtcctttttcagaatcaatgacggccgaaaacgggacgtttacggtcaaaggtccagccggggatcaggtactgcatcggacctgcgtcgttacgcgcaccgccaggcagacgtttataggcctcatgtgccttttgtacctgttcccagtccagttccacgcccagaccgggcgcatcaggaacagcaatttttccgtttttaatctccagcggatttttggtcaggcgacaatcgccctcctgccaaatccagtgggtatcgatagcggtaggattacccggtgccgccgcgcccacatgggtaaacatcgccagagagatatcgaaatggttattagaatggcagccccaggtcagcccccagtcgtcgcaaagctgcgccacacggactgcaccggaaagcgtccaaaagtgcggatcggcaagtggaatatctaccgcattgagcatcaccgcatgacccatttcgcgccagttggtggcgatcatgttagtcgcgacgggcaagccggtcgcccgccgaaactccgccataacttcacgaccggagaaaccctgttctgcgccgcatggatcttcggcataggtaagaacatcattcagccctttgcatagagaaatggcttcatcaagtagccaggcaccgttgggatcaacggtaatccgcgcatcagggaagcgtttcttcaatgcacgaacagtgtcgatttcttgctcgccaggtaacaccccgcccttaagtttgaaatctttaaagccatagcgatcctgtgaggcttccgccagacgcacaacggcttcgctgttcatcgc

SEQ ID NO: 274 - DNA, 14376 bp, Escherichia coli
  source 1..14376: mol_type = genomic DNA
tttttcgctttgctgtggtctacttattcgcgcgtgtagattttacttatctgactacctccgcacttttcccctgccgggcctgaaaagccgctaagcagggtgttatcacctgtttgtccagggtttgtttgcatgagatacatcaaatcgattacacagcagaagctgagctttttgcttgcaatctatattggcctttttatgaatggcgcggttttttatcgccgcttcggcagctatgcgcacgattttaccgtctggaaaggcgtttctgctgttgttgaactggccgccaccgtactggtgaccttctttttactacgtcttctatcgctgtttggccgccgcagctggcgtattctggcgtcgctggtggtgctcttttccgcaggtgccagctattacatgaccttccttaatgtggtcattggttatggcatcatcgcttccgtcatnnnnnnnnnngacctgtcaaaagaagttgttggtctgaactttattctctggttaatcgccgttagtgcattgcctcttatccttatctggaataaccgctgtcgctacaccttgctccgacaactgcgaaccccagggcagcgtattcgcagcctggcggtcgtcgtactggcgggtattatggtttgggcaccgattcgtttgctggatatccagcagaagaaagtggagagggcgaccggcgttgatttgccgagttatggcggtgtcgtagcgaactcttatctgccatcaaactggctttctgcgttggggctgtatgcctgggcgcgggtcgatgaatcttccgataataattcattgcttaatccggcgaagaaattcacttatcaggcaccgcaaaacgttgatgacacttatgtcgtgtttatcatcggtgaaaccacgcgttgggaccatatgggcattttcggctatgagcgtaataccacgccgaaactggcccaggagaaaaatctggcggcgttccgtggttactcctgtgataccgcaaccaaactctcactgcgttgcatgtttgtacgtcaggggggcgcggaagataatccgcagcgcacattaaaagaacagaacattttcgcggttctgaagcagttaggattcagttctgacctctacgctatgcagagcgaaatgtggttctacagcaacacgatggcggacaacattgcttatcgtgagcagattggtgcggagccacgtaatcgtggcaagccggtagatgatatgttgctggtagacgaaatgcagcaatcgctagggcgcaacccggatggtaagcatctgatcattctgcataccaaaggttcgcattttaactacacccagcgttatccgcgtagcttcgcgcagtggaagccggaatgtattggtgttgatagcggctgtaccaaagcgcagatgatcaactcctatgacaactcggtgacctatgtggatcactttatctccagcgtgattgatcaggttcgcgataagaaagcgattgtgttctacgcagctgaccacggtgagtcaattaatgaacgcgagcacctgcacggcacgccgcgtgaactggcaccgccggagcagttccgcgtaccgatgatggtctggatgtcagataaatatctggaaaatccggccaatgctcaggcatttgcgcagctgaaaaaagaagccgacatgaaagtgccacgccgtcatgtagagctgtacgacaccatcatgggttgtcttggctatacttcaccggatggtggaattaacgaaaacaacaactggtgtcacatcccgcagacaaaagtggcagcggctaactaagcggcctgctgactttctcgccgatcaaaaggcattttgctattaagggattgacgagggcgtatctgcgcagtaagatgcgccccgcattcggtgattggcgcagcctggtagcgcacttcgttcgggacgaaggggtcggaggttcgaatcctctatcaccgaccaaattcgaaaagcctgctcagcgagcaggcttttttgcatttgaagcccatgaggatgagaacctccgggggcggggaggttcgactcgagcgaagcgagagaacgttgcgccagcaacggcccgcagggcgagccacgaagtggcgagtaatcctctatcaccgaccaaattcgaaaagcctgctcagcgatcaggctttttttgcatttgtagcccatgaggatgagaacctccgggggcagggaggttcgactcgacgtaggcctgataagacgcgccagcgtcgcatcaggcaacggcaccgcacttattgtcggatgcggcgcgaccgccttattcgaccaacacaccacacattttcctgccaactttgcgccccatatctcactatccattaacggatttgtgacagaaaccattgtctttttttatatttgcttaaatctttttttgcgttacttatggctggcgctggcattttccgctgtgcgttttagcgttcatggtattaatcgctcagatatccaccttttcctcagatttttttcattaaatgcataaaacttaatcaccaaatgttgctaaatattaagctgattgttctggtcatgttggagtagcacaaatttctctgctgcaaatagctgtttgaagtttttttaatctttgtttgtggattctcaccgttggtgtaaatcccggttggctgtattgacgttttcacattctgttgacagattgtaggtcacgaggggcattttatggaggatccgcactgttacactgatgttaattagtacggcatccccacctcataacgttgacccgaccgggcaaaaaacaaaaaaggtcaggcagcgacaacccactgcaaagggttaaaacaacaaacatcacaattggagcagaataatgcgtatttccttgaaaaagtcagggatgctgaagcttggtctcagcctggtggctatgaccgtcgcagcaagtgttcaggctaaaactctggtttattgctcagaaggatctccggaagggtttaacccgcagctgtttacctccggcaccacctatgacgcctcttccgtaccgctttataaccgcctggttgaatttaaaatcggcaccactgaagtgatcccgggcctcgctgaaaagtgggaagtcagcgaagacggtaaaacctataccttccatctgcgtaaaggtgtgaagtggcatgacaataaagaattcaaaccgacgcgcgaactgaacgccgatgacgtggtgttctcgttcgatcgtcagaaaaacgcgcaaaacccgtaccataaagtttctggcggtagctacgaatacttcgaaggcatgggcttgccggagctgatcagcgaagtgaaaaaggtggacgacaacacagttcagttcgtgctgactcgcccggaagcgccgttcctcgctgatctggcaatggacttcgcctctattctgtcaaaagaatatgctgatgcgatgatgaaagccggtacaccggaaaaactggacctcaacccaatcggaaccggtccattccagttacagcagtaccaaaaagattcccgtatccgctacaaagcgtttgatggctactggggcaccaaaccgcagatcgatacgctggtcttctctattacccctgatgcttccgtgcgttacgcgaaattgcagaagaatgaatgccaggtgatgccgtacccgaacccggcagatatcgctcgcatgaagcaggataaatccatcaacctgatggaaatgccggggctgaacgtcggctacctctcgtataacgtgcagaaaaaaccgctggatgacgtgaaagttcgccaggcactgacctacgcggtgaacaaagacgcgatcatcaaagcggtttatcagggcgcgggtgtatcagcgaaaaacctgatcccgccaaccatgtggggctataacgacgacgttcaggattacacctacgatcctgaaaaagcgaaagccttgctgaaagaagcgggtctggaaaaaggtttctccatcgacctgtgggcgatgccggtacaacgtccgtataacccgaacgctcgccgcatggcggagatgattcaggcagactgggcgaaagtgggcgtgcaggccaaaatcgtcacctacgaatggggtgagtacctcaagcgtgcgaaagatggcgaacatcagacggtaatgatgggctggactggcgataacggggacccggataacttcttcgccaccctgttcagctgcgccgcctctgaacaaggttctaactactcaaaatggtgctacaaaccgtttgaagatctgattcaaccggcgcgtgctaccgacgaccataacaaacgcgttgaactgtacaagcaagcgcaggtggtgatgcacgatcaggctccggcactgatcatcgctcactccaccgtgtttgaaccggtacgcaaagaagtcaaaggctatgtggttgatccattaggcaaacatcacttcgaaaacgtctctatcgaataattaaaagccatacaagactgatggcaaaggcaaaactgcctgatgtgctccgcttatcaggcctacgaaaattctgcaatgtattgaatttgcacgattttgtaggccggataaggcgttaacgccgcatccggcataaacaaagcgcactttgtcaacaatctgtatacccggtggcgctgtgcctctgcgtgcagcgccatccggcagcaatacttcattctctgtccgacaagggcgggaattgatttgtgagcaatacagacacgcagttccaggctgcgggtcactatagagaatccgggttatgttgcagtttattctccgacgtttgggactcgtcatccccacgtttatcggtattacccttctcacatttgcctttgtccacatgatcccgggcgatccggtgatgatcatggcaggcgaacgtgggatctcccctgagcgtcacgcgcagctgctggctgaactcggcttagataaaccgatgtggcagcagtatctccattacatttggggcgtaatgcacggcgatctaggcatttcaatgaaaagccgaattccagtatgggaagagttcgtgccgcgctttcaggccacgctggaacttggcgtctgcgcgatgatttttgctacggcagtcggtattccggttggtgtgctggctgcggttaaacgcggttccattttcgatcacacagcggttggcctggcgctgaccggctactcgatgccgatcttctggtggggcatgatgctgatcatgctggtttcggtgcactggaacctgacgcccgtctccggtcgcgtgagcgatatggtgttcctcgatgactccaatccgttaaccggttttatgctaatcgacaccgccatctggggtgaagacggcaactttatcgatgccgtcgcccatatgatcttgcctgccattgtgctgggtactattccgctggcggtcattgtgcgtatgacacgctcctcgatgctggaagtgctgggcgaggattacatccgcaccgcgcgcgccaaagggctaacccgcatgcgggtgattatcgtccatgcgctgcgtaacgcgatgctgccggtggtgaccgttatcggcctgcaggtgggaacattgctggcgggggcgattctgaccgaaaccatcttctcgtggcccggtctgggacgctggttgattgacgcactgcaacgccgcgactatccggtagtgcagggcggcgtattgctggtggcgacgatgattatcctcgtcaacttgctggtcgatctgctgtacggcgtggtgaacccgcgtattcgtcataagaagtaaggggacatcatgtcacaggttactgaaaataaagtgattagcgcaccggtgccgatgaccccgttacaggagttctggcactattttaaacgcaacaaaggcgcggtcgtcgggctggtttacgtcgtcatcgtgctgttcatcgcgatctttgccaactggattgcaccctataacccggcggaacagttccgcgatgcactgctcgccccgccagcctggcaggaaggcggcagcatggcgcacttgctgggcaccgatgacgtaggccgtgatgtgctgtcgcgcctgatgtacggtgcgcgcctgtcgctgctggttggctgtctggtagttgtgttatcgctgattatgggcgttattctcggcctgatcgccggttactttggcggcctggtcgataacatcattatgcgcgtggtcgatatcatgctggcgctgccaagtctgctgctggcgctggtgctggtggcaattttcggcccgtcgattggtaacgccgcgctggcactgaccttcgttgccttgccgcactatgtgcgcttaacccgcgccgccgtgctggtggaagttaaccgcgattacgtcaccgcgtctcgcgtggcgggtgccggggcgatgcgtcagatnnnnnnnnnnagatgtttattaacatcttcccgaactgccttgcgccgctgattgttcaggcgtcgctcggtttctctaacgccattctcgatatggctgctcttggtttcctcggcatgggggcacagccgccaacgcctgagtggggcaccatgctctccgacgtgttgcagttcgcgcaaagcgcctggtgggtcgtgaccttcccgggtctggcgatcctgctgacggtgctggcatttaacctgatgggtgacggtctgcgtgacgcgctcgatcccaaactgaagcagtaagaggttcgagatggcgttattaaatgtagataaattatcggtgcatttcggcgacgaaagcgcgccgttccgcgccgtagaccgcatcagctacagcgtaaaacagggcgaagtggtcgggattgtgggtgagtccggctccggtaagtcggtcagttcactggcgattatggggctgattgattatccgggccgcgtaatggcagaaaaactggagtttaacggccaggatttgcagcgtatctcagaaaaagagcgccgcaacctggtgggtgccgaagtggcgatgatcttccaggacccgatgaccagccttaacccgtgctacaccgtgggtttccagatcatggaagcgattaaggtgcatcagggcggtaataagagcactcgccgtcagcgggcgattgacctgctgaatcaggtcggtattcccgatccggcatcgcgtctggatgtttacccgcatcagctttccggcggcatgagccagcgcgtgatgatcgccatggcgattgcctgtcggccaaaactgctgattgccgatgaaccgaccaccgcgctggacgtgaccattcaggcgcaaatcatcgaactactgctggagctacagcagaaagagaacatggcgctggtgttaattacccatgacctggcgctggtggcggaagcggcacataaaatcatcgtgatgtatgcaggccaggtggtggaaaccggtgatgcgcacgccatcttccatgcgccgcgtcacccgtatactcaggcattgctgcgtgcgctgccagaatttgctcaggacaaagaacgtctggcgtcgttgccaggtgtcgttcccggtaagtacgaccgcccgaacggctgcctgcttaacccgcgctgcccctatgccactgacagatgtcgcgctgaagaaccggcgctgaatatgctcgctgatgggcgtcagtccaaatgccattacccacttgatgatgccgggaggccgacactatgagtacgcaagaggccacctcgcaacaaccgctgttgcaggctatcgacctgaaaaaacattatccggtgaagaaaggcatgttcgcgccggaacgtctggtgaaggcgctggacggcgtttcgtttaaccttgaacgtggcaaaacgctggcagtagtgggcgaatctggctgcggtaaatcgaccctcggtcggttgctgacgatgatcgaaacgcccaccggtggtgagctgtattaccaggggcaggatctgctcaagcacgatccgcaggcgcagaagctgcgtcggcagaaaatccagattgtcttccagaacccttacggttcgctgaatccgcgtaaaaaagttgggcaaattctcgaagagccgctgcttattaacaccagcttcagcaaagaacagcgtcgggaaaaagccctgtcgatgatggcgaaagtcggcctgaaaaccgagcactatgaccgctatccgcatatgttctccggcggacaacgtcagcgtatcgctattgcccgtggtctgatgctcgacccggacgtggtgattgccgatgaaccggtttctgcgctggacgtctcagtgcgtgcgcaggtgctgaatctgatgatggatttgcagcaggagttggggctttcttatgtctttatctcccacgacctgtcggttgtggagcacattgctgatgaagtgatggtgatgtacctgggccgctgcgtggagaaaggaacgaaggaccaaatcttcaataacccgcgccatccgtacacccaggcgctgctctccgcgacgccacgcctgaacccggacgatcgtcgtgaacgcatcaaactcaccggtgaactgccaagcccgctgaatcctccgccgggttgcgccttcaacgcccgctgtcgtcggcgcttcggcccctgcacccagttgcagccgcagctaaaagactacggcggtcaactggtagcttgttttgctgttgatcaggatgaaaatccgcagcgttaactcacaaaaccggggccatgcgctccggtttactcaatcagcttcaacagtggcgacaagcatagcaaaatgccgtaaagcagaattagccaggctttaaatccgcgaagtttttccagttgtgcgactttatagatcaggaaaaacggaatgaggcacgacacaattccatataacgggcttcccaactgaaagaacaccagcaccgatacacgaaacgaaacccaaatcgtcaatgtaatgacgataaaagcgcagatcgccagagtcagcatgcgtgagttaattttcttggtatcaataattcggcttaacagattgagaataatgcctttaatagcctcgtggaaaccgagataaatgccaaagaatgcggtcagtacggcaaagatattcagcaccgtagaggtgatatgaatgatatgtccagggatcacctgcgcggccagcgccagtgccgagatattttgttcaaaggcagaaacggcttcttcgtggctaattgagaaggtaaacgaaaaggcaaaaaacaggatcaccgcgatgagcgtgatataactaattcggtgggtacgcagcgcgagccgggttgccagtactttatctgcttcccgtttacgataggcaatattcattgggttaagtacctgaataaataccgcagaaaagaagcaaaatggaattgtaagcaggacatcgcggaaaaagacggaggcttgcgggaaggcggttatattggcgaaattccagtgcgggatcatcgcaaaaccgaacacgacaataatccctactttgaccaccaccattggcccggaaatcttaaacagtaatcgttcaccaccagacgcaatcgccaccagtacggcgaaaatagcgactttataaagtagagattgtgaaagatcggcatcggttaaaccgaaggttttcaggtacgaggcgctgtcgaaaaccacggagagagagtagataaaaatcccgtggataatcatcaaaaagtagataaccccgaggaaaattccccagttcttccccaggtaatgactgataatatcggtgtagtcattacaggaatcgctttcagaaagggtttttaaataaatgtcctgcactacccaggtggcaggataagcaatgatcgctgcggtaataaatacccaaattcccttcaagccaatttgtactggcatcagcacggttccggcaccaatcgccatgcctatgcataataaaacccagccgaagtcgtagcgtgtaaacggcaatttctgattgtgtttcgatagtgtgttgtgctgcataaagtcctgtccagaaagaagtcggcctcgcaaaaatgaataaacccagtttctcttgcgcaacaggtggagaagtcgaatacgcagtatgtaaaaaatgaggcaacagattcactggggaggtcgcgaggaggcgcaattctacaaaattgcgcatttcactaccagtctggagtcagcccggatatgaactgcaactattgcaaataaagaaattaagctggaaggcatcgcgcaatgaggaagattgccgggtgctgacagtaaaaagcaatcgtaaaatcagcggcaagccggaagggttccggtgaggcgcaatgttgcgggggctttatccctggtggcattggttgctggagagagaaaacccccgcacgttgcaggtatatacctgacaacataacgggggctaatcttgaacctagaccactcaagaatagccgcgaaacgttgtcattacaacacaggcggctatatgacgctcgcagagctgggcatggccttctggcatgatttagcggctccggtcattgctggcattcttgccagtatgatcgtgaactggctgaacaagcggaagtagcgtgtcatgtgggcgtcaggctgccgtaatggcaatttgcgcccggaccaggccgcaggagtgaaactctgcggcctttttcgtaagaaaaatgcaacggttgcaagcggataatattctgcggaatgcgcagcacagagtgaagatgagacggattccggaacagaaaaacagtcgtagaatcagcgtcaagccggaaggattccggtgaggcgcaatgttgcgggggcttaatccctggtggcattggttgctggagagagaaaacccccgcacgttgcaggtatgcacctgacaacaccacgggggccattcttgcatccaaacaatacaagaatagccgcgaaacgttgtcattacaatacaggcggctatatgacgctcgcagaactgggcatggccttctggcatgatttagcggctccggtcattgctggtattcttgccagtatgatcgtgaactggctgaacaagcggaagtaacgtgccatgcgggcgtcaggctgccgtaatggcaatttgcgcccggatcaggccgcaggggtgaaactctgcggcctttttcgtaagaaaaatgcaacggttgcaagcggataatattctgcggaatgcgcagcacagagtgagtaagtgatggattccggaacagaaaaacagtcgtagaatcagcgtcaagccggaagggttccggtgaggcgcaatgttgcgggggctttatccctggtggcattggttgctggagagagaaaacccccgcacgttgcaggtatgcacctgacaacatcacgggggccattcttgaacctgaacaactcaagaatagccgcgaaacgttgtcattacaacacaggcggctatatgacgctcgcagaactgggcatggccttctggcatgatttagcggctccggtcattgctggcattcttgccagtatgatcgtgaactggctgaacaagcggaagtaacgtgtcatgcgggcgtcaggctgccgtaatggcaatttgcgcccggaccaggccgcaggggtgaaactctgcggcctttttcgtaagaaaaatgcaacggttgcaagcggataatattctgcggaatgcgcagcacagagtgagtaagtgatggatttcggaacagaaaaacagtcgtagaatcagcggcaagccggaaaggttccggtaaggcgcaatgttgcgggggctttatccctggtggcattggttgctggagagagaaaacccccgcacgttgcaggtatgcacctgacaacataacgggggctaatcttgaacccaaacaactcaagaatagccgcgaaacgttgtcattacaacacaggcggctatatgacgctcgcagagctgggcatggccttctggcatgatttagcggctccggtcattgctggcattcttgccagtatgatcgtgaactggctgaataagcggaagtaacgtgtcatgcgggcgtcaggctgccgtaatggcaatttgcgcccggatcaggccgcagaggttaaactctgcggcctttttcgtgcttactgcgggtaaggcacccagtcgccgccgttcaggcgaacgtacggtttatcctggtattgaataactactgcatttgagttctcggagaccggtgctgtttgtggcaacccactggtgagttttttccagtcaacattgtcttcggtgaaaatcttgccatcaagaacgcgaaccaccagatcggagatagccaggaagctgctcggttggtcaatgacaatcggtgccccctgatgtggtgccttcatgccgaagaatttcaccccaacggggacgtctgtgatagacgggctagggatatcacgtaggccagatacctgcattctgtcgcccttcagcgcgccgccgtgttccggcaccacgaccaccatcactttacgacccgatttctccagttcagtaaagaaggcgtccagttcatcaaagaatttctgcgcccgcgctttgtaatccgctgttttgctgacccccggataatggttgccgtcatgcagtggaagcgtgttgtagaacgtggcactacggctatttttatctttttcggtaacgtccagccagcggttaagcacggcggtatcgtcataaaccggcgaaccatcaaagcccagcaaaataaccggcagatttgtttgatccatcaattcagtctgcatgccgccattttcgcgaacttctttcaaaaaaccgccgaactggccgttatgccccatcatcaggtgctgggtaaagcccagtttcgaaaggttatcaaacagatagcagtcgttatttgccggttgatacagattagtgtgcgaagtctgcccgcagctggcgcgcagtaaacggatcgccgccgggccactgtaggaggtggcggagttaaagttcttgaactcaatatcgaaatgcgaccacagtggatgcgacatcaacccggcggcttctatatccgaccaggaaagcgaacagatgttaatcaccagtagttcaaatggctgagcatcagcgggcagcgaagacgggaaggtcgatttacgtttcgcctccgcgttatagaaattattcagccaggcgttaaggttcgccgttgttggcggtgcagtttgtgcgggcatatcacccactaccggtgcgccacccgtcgccgcaacggttgccgctgcgttaccacccgtcgttgttacagtggtcgtcggttgtccggctggccacaaggagaaacttggtcccgccagggtaagtacgttcagccatagcagtatggcaaccacaaaaacggtaatgcgaatccattgtgacaggaataaccaggccactaataaaacaaaaatggccccaatcatctgccagttaataaagcgtgtgacaaggtcgattaaataatcggtactgaaccccgccacctgcgaaccctggctcattatgctttccgggccaggcaaccaggtgtcatgccagaacaaagcaaagccgatcggcagggcaatccagtggcgcaagcgatgcaggctgtagcgcggaatgggcatcagcagaaacgcggcaaacaccaaattgaggagcggatggaagttaagatatcccgcccacaacaggccgaacttaaccagaaaatagaagttccagccggaaaggccgcgccagtattgccagagggaagaaggcatggcggtattttgcgtaaattgagtcattttttggttgccctggctttttccgtgcggcgtaacgtcccggccggtttaacataacgaggtttagcaaagaacaaacgtaaggtgtcgcgaatgcgtcgcaaagagtgccgcgccagatagcccagcgggaaaaatatcagtgcgcaaacgacaataatttcaatgatatcgctgatggtcatcatgatgagcgctccacagcatcatctaacagtcgcatgggttctggtattcgtcgccagtggcgaccatcgtgctcggcattgatgaccggtttagaactttgcgttaaaggcagcggcatgccccattgttctggggcaagcaagcgcatctgcaccagctcggcactgatttgatcatcttcaaaccagaccatacggtttgagaaaatgtcgccagtaggcaatgggggtgatgctgccaacttactgatttagtgtatgatggtgtttttgaggtgctccagtggcttctgtttctatcagctgtccctcctgttcagctactgac

SEQ ID NO: 275 - DNA, 14151 bp, Escherichia coli
  source 1..14151: mol_type = genomic DNA
atcttttatttattccccataatgatattaagcgttttctgatcgggcaaccccacggcctgttgtagcgtattttccttactcatgtaatagatagccggcgtgacatttgcccccagatcgtccatcagtttctcattgtcacttaacactttcatttgctctgtacttacgtttgcaggcacgtttagcttaagcttgccaccagaggcttcatattgttgccaggtttttgcgggatctttggaggcaagaattgccgctgctgtcgccgggctttctggcttgataaccccaaccaacaatgttcttaattgcactttgccagaatctacccacgggcgcgcctgctgccagaactgtttacaatatgggcagaacggatcggcgaagacgtagacaatgaccggcgcatcttttttaccgtcgaggagccagtgggattgttccatccgttgccacatttcgcgtccggctggtgcgtaaatttctttttcgataagtgtgttactcaggttttcacctttctcgttgtacatgtaaccagagatagcgtgcttaccatctggagtcaggtagatggtgacgcccatatcctgatactttccgagataacctttcattcctccgggggcatcgaacgttttgatgattgtaatgccctgtttttcaatcgcttttactggagcaggaagttcctctgcgaaggcgattgcaggaagcagagccagtaaaagtatcttttttaacattaatttgtccttttcagtcagtgcaaaagtcgagtaaaaggcataacctatcactgtcataggtaagagcttagatcaggtgattgccctttgtttatgagggtgttgtaatccatgtcgttgttgcatttgtaagggcaacactcagcctgcaggcagtcgctgaagataccaaagggtagttcagattacacggtcacctggaaagggggccattttactttttatcgccgctggcggtgcaaagttcacaaagttgtcttacgaaggttgtaaggtaaaacttatcgatttgataatggaaacgcattagccgaatcggcaaaaattggttaccttacatctcatcgaaaacacggaggaagtatagatgtccttgattaacaccaaaattaaaccttttaaaaaccaggcattcaaaaacggcgaattcatcgaaatcaccgaaaaagatacagaaggccgctggagcgtcttcttcttctacccggctgactttactttcgtatgcccgaccgaactgggtgacgttgctgaccactacgaagaactgcagaaactgggcgtagacgtatacgcagtatctaccgatactcacttcacccacaaagcatggcacagcagctctgaaaccatcgctaaaatcaaatatgcgatgatcggcgacccgactggcgccctgacccgtaacttcgacaacatgcgtgaagatgaaggtctggctgatcgtgcgaccttcgttgttgacccgcagggtatcatccaggcaatcgaagttaccgctgaaggcattggccgtgacgcgtctgacctgctgcgtaaaatcaaagcagcacagtacgtagcttctcacccaggtgaagtttgcccggctaaatggaaagaaggtgaagcaactctggctccgtctctggacctggttggtaaaatctaaatttccttcgtctttcgcgctaccaactccggcgcgaaatacttcggaaattcacctaattcttcgggtgctgcggcacccgattttcttccccgcaccatgatgcaagctgcatccaggtagccgcagaggccgcttgcatgatgatgtttaaagcccaggagataaacatgctcgacacaaatatgaaaactcaactcaaggcttaccttgagaaattgaccaagcctgttgagttaattgccacgctggatgacagcgctaaatcggcagaaatcaaggaactgttggctgaaatcgcagaactgtcagacaaagtcacctttaaagaagataacagcttgccggtgcgtaagccnnnnnnnnnntcctgatcaccaacccaggttccaaccaggggccacgttttgcaggctccccgctgggccacgagttcacctcgctggtactggcgttactgtggaccggtggtcatccgtcgaaagaagcgcagtctctgctggagcagattcgccatattgacggtgattttgaattcgaaacctattactcgctctcttgccataactgcccggacgtggtgcaggcgctgaacctgatgagcgtattgaacccgcgcatcaagcacactgcaattgacggcggcaccttccagaacgaaatcaccgatcgcaacgtgatgggcgttccggcagtgttcgtaaacgggaaagagtttggtcagggccgcatgacgttgactgaaatcgttgccaaaattgatactggcgcggaaaaacgtgcggcagaagagctgaacaagcgtgatgcttatgacgtattaatcgtcggttccggcccggcgggtgcagcggcagcaatttactccgcacgtaaaggcatccgtaccggtctgatgggcgaacgttttggtggtcagatcctcgataccgttgatatcgaaaactacatttctgtaccgaagactgaagggcagaaactggcaggcgcactgaaagttcacgttgatgaatacgacgttgatgtgatcgacagccagagcgccagcaaactgatcccggcagcggttgaaggtggtctacaccagattgaaacagcttctggcgcggtactgaaagcacgcagcattatcgtggcgaccggtgcaaaatggcgcaacatgaacgttccgggcgaagatcagtatcgcaccaaaggcgtgacctactgcccgcactgcgacggcccgctgtttaaaggcaaacgcgtagcggttatcggcggcggtaactccggcgtggaagcggcaatcgacctggcgggtatcgttgagcacgtaacgctgctcgaatttgcgccagaaatgaaagccgaccaggttctgcaggacaaactgcgcagcctgaaaaacgtcgacattattctgaatgcgcaaaccacggaagtgaaaggcgacggcagcaaagtcgttggtctggaatatcgagatcgtgtcagcggcgatattcacaacatcgaactggccggtattttcgtccagattggtctgctgccgaacaccaactggctggaaggcgcagtcgaacgtaaccgcatgggtgagattatcattgatgcgaaatgcgaaaccaacgtcaaaggcgtgttcgcagcgggtgactgtacgacggttccgtacaagcagattatcatcgccactggcgaaggtgccaaagcctctctgagtgcttttgactacctgattcgcaccaaaactgcataagaagaagtaagattcacctgcaattgcttagccgccggggtcaaacctggcggcttttttatggcattaaaaagccctgccgggatggctccgggcagggcgggatatttattctggcaattaacgcacaaccagcaccggcagattggcatggcggatcacgctcgaggcgttagaacctaacagatgggtcgaaatcgatgggttgcgagaaccaataactacaacatcagcccccagttcttctgccaactcattgacttcatcccgcacgctaccaaaacggacatgttgtttaatgcgggaaggatcgatggtgaagtggctgaccatcgtttgcagacgttcttctgcttcatgttgcagatgctcttcaaaacgacgcacatcagcggcaaaacggtgcaggctcaggctggctgacccgggtagtacgtgaagtagatgaataactccgtcatcctgggcgaggaattcagcgtggcgaacagctttgtcgctcaattccatttcaaatacatcaactggcataatgattgtcttatacataaccctttctccctgttaatcatgaacaaatcattcgccatgattataatatttatccctgatatttgtctggttctttttccttacgaacggtttctgtgattaatatattctcactgaacaccaggaattctcccaaaacctgcggtaccgcccgttttcccgctgtgatagctacccttaaagactgactcttttttgaactgtctctggaggttgcatgaaagcattgacttatcacggcccacatcacgttcaggtagaaaatgttcccgatccgggcattgaacaggcagatgatattattctgcgtattacggcaacggcgatctgtggctctgacctccatctttatcgaggcaaaataccccaggttaaacatggcgatatttttggtcatgaatttatgggggaagtcgttgaaaccggaaaggacgtaaaaaatttgcaaaaaggcgaccgggtggtaattccgtttgtcattgcttgtggcgactgttttttctgtcgaatgcagcaatatgccgcctgcgaaaataccaatgcgggtaaaggcgctgcgctcaataaaaaacagataccagctcccgcggcattgtttggttatagtcacctgtatggtggcgttcctggtggacaggcggaatatgtccgcgtccctaaagggaatgtggggccgtttaaagtaccgcctttgctttcagatgataaagcccttttcctttctgatattctgccaacggcatggcaggcagcaaaaaatgcgcagatccaacaaggttcaagcgttgcagtctatggtgccggtccagtgggattgttgacaatcgcctgtgcacggttgctcggtgcggaacagatttttgttgttgatcatcatccctaccgcttgcgtttcgccgctgaccgctacggcgcgatcccgattaatttcgatgaagatagcgatccggcacagtcaattattgaacaaacggcaggtcaccggggcgtggatgcagtaatagacgccgtcggttttgaagcgaaaggcagcaccacggaaacggtgctgactaacctgaaactggagggcagcagcggtaaagcgttgcgccagtgtattgcggcggtcaggcgtggcggcattgttagcgtaccgggcgtctacgctggatttattcacggtttcctgtttggcgacgcctttgataaagggttgacgtttaaaatgggacagacccacgttcacgcatggctgggagaattattaccgttaattgagaaaggattactgaaaccagaagaaattgttacccactatatgccgtttgaagaggccgcccggggatatgagattttcgaaaaacgtgaagaggagtgccgtaaggtgattctggtacccggtgcacaaagcgcagaggcggcgcagaaggcggtttcaggtctggtgaatgcgatgccggggggaacaatatgatcgtcaggagtggttttcgaggtaaaggacagccatgacgataatcgccgccataatcagaaatcctatcaggatgtaaaatgcttctgccatggttattcccacaaacgaaacggaataattttgcagcaaaagtgaacagtgagaaccaggaaaaattgctgattttgcgtaaagaggatgcgagtgcatcctctgggcaaagcgagttatcgcttgtgcagatgggattaaagcaggtagtcgccagcagcttctggctggtattcgagttccagcacttcaaggtgggttgcaacgccgcccggaagttcccagtgaatggaatcgccaacgcgcagccccagcagtgcggcacctaccggagccataacggaaagctgagtattgctatcggtcatttttgccggatacaccagcgtgcgcacacgcacttcgccatcgctaagattgcggaatttaacccggctgttcattgtcaccacgtcgtgtggcatctcttctggcgaacacatttgggcgcgatccaactctgcgtttaacgcgtcggcgattggcaaaccagcataggcgggttgctccagcagaatatcgatgcgttcggcatccaggtcgttaatgatgatagttggtctggacatttttactccatgtcgtcggtactgcgagtgtcgcagataaacatacccaaaagaaaaccctcaccgtcaggcggcgagggtttaactcacatgatgatactgactgttgctcactctttgaagtgatttgcgtcacattcagggaattcctcaatgcagcgcattatgtataattcttaatcgtcacggtttatggaagacgaattagcgtgttttgtaaatcagatgattaataacccactttatcaatcacaaaggttttgccacagttgcctgggtgtggttgtggcaagaatgagtttgcagaaagcggagcgttgatggcgtcagctttgatcgagatctgaatttcagtcaaatacgcagggttaccctggcacgttagcttaactgctttcacgttctcttttccccagcttttggcaaaggcggcgtcaaagtcacggcggctcactgttttaccgtaattatccgcaaggaattttccggcttcgctctctttaatttcttgattcaggcgtaccatcgtaccgaagtatgcgtccggatcaaaaccaaagcaggcaccgtgtttggcatattcgtagcgttccaggcaggaacgtccgccagctcctggcatgacttcacttagtttagcggccgtttccagtgataatccggtttccggcgatgaacacatccggctggcgtgcgcttctggtagattcgggattgggcgagtagcgcaaccgaagcgcatccagcggcgttcatcaacaccacgggcagcaaccgatttaggcaatcctggccacagaccatgtacggtcagaaaatcagctttgttggtcgtttcggtttgcaggcgacattcatctcgttcgttacgatttcgatcgtgttgactctggcaaaatccggtttgccaggagagggccaggacatagcgatcaaaatcgccatactgttttgcctgcaacgctaaggcgttggcagaagagaagggaagcagagaaaccgcgagcaacgcggcgttacgccagaatgctttcataatgggtgtggaactcatacatacactgaatactatctattaaatcataaaaaagcccgccaggtgggcttacctggcgggcgtgatgatttattcagcgtttggcgaacgtattagttccacatggcgagaatcggccagccaaccaacagcaacatagagatgtaaatcaccccgaagattgcgccaagacgccagtaatcttttgatttcacatagccacagccgtaaataatcaccccaggaccggttgcatacggcgtcagacagcccatgataccgatagacagcaccagcaggatacacagttgttccattggtacgcccggaatacctttaccgacggccagaataaccggcagcatggttgcggtgtgcgcagacaggctggcaaacaggtagtgtgcaaagtagaacaccagaaccagtacaatcaccgttgcgtttggtgagaatccttccaggtgcgtactcatggtaccggcgaaccagtcaataaagccagaacgagtcaggccgttagccatcacaaccagagttgccaggttgaccagcgtgttccatgcgctgttatagcgggtaatatctttccaaggcacaacgtgcagggccagcattagcgaaactgccagcagaccaaccgcagtagcattaatgacttcactgccaaatacccacaaacctaagctgagcaatacaaggccaatcagcgtccactctctgcgtgtcagcgcacccatggtttttagttcatcacccgcccaggttgccacttcttcactgtgtgtgatttccggtttgtacagcacgtaggaaagccacggcgcaatgataagcaagataaccccaaccggcaggaagcagaggaaccactgcaaccagctaatctggataccggcaattttgctgacgaactccagacccagcacgtttggtgccgcaccggtgacaaacatggacgaactcagactggtactaatgaccatcatccatatcaaatagccgccaatacgacgcgcggacggatcgttggggaatgatttaaacagcggcggcaggtttttaatgaccggaaaaaccgtacccccggtacgcgcggtgttggacggtgtaaacggtgccagcagaatgtcgataatgacaatcgcataacccaacgtcagcgtgcgtttgcccatgaatttcaccaggaaaagggcaatgcgacgacctaacccggaaacttcataccctaatgcaaaaataaatgcgccaaataccagccataccgtggtgctggaaaaaccagccagaccccatttcagcgcctgtttttgcgcattaaacgctgggtcagctaattctttggcatcaaagagcaggtaattactgccaataacgcaaatagtaaccgcaataaaactgatcgctgttgccggaattggctcgaggatcatgccgacaatcattgccacaaacacagcgaagtaatgccatgcctgtggtggcataccgtcggggacagggataagaaacatgacacccatcaccaccagtggggccaatagtttccatatattatcttttgctaaagacatacgggttctccgaaaattaatatttccaaatttatcaagtgcttaaataattaaatctgtgctaaaaaccaggtaaggatcagcaggtcggcactgccgcctggactgagatttcgttcgatacactccctgtcgaactgccggagataatcgagatcggcgggggttcgaatgccccctttttgcaataatgtttgcgcctcgcgctgtagccagcgcaggcccccctcgccaccgcgcgatgcaacgttggtatcgccgttgatcgccatcagtaggagcaaggtatcgagcaatgccagttcaggatctaacccctgatccagcagagtgaggtaatgcggcaaggcgtgattgatcaccagtggataacccgcttcggcttcaccgcgtgcgccggtaaggccaagctgctggtacaaccgttgacctgccgtcagttgtgaattattggtacgcagttcgcgatcggtcaggccacggcagaaacttgccgccgtagaacaaacggttgttggcgttaccggctggttgagctgaagcaaacggccaattgccgcacatagcagccctaaagaaaaaatgctgcctttatgcgtgtttacgcccgcagtggcgcggaacatatcaccttcgcaagccataccaattgggcgtaatccgtggagtaccgcttccggtgccatttctgcactacaggcaccaaattcaatgaaacggggtaaccagccctgaatcgccagcgcgctgcggtggaaatcttccagcgccatatctttgtgcgcaccgcagttaatgcgatccacgaggcctggtttcggtgacagattgacttcagtcagcatggcgcgccagcccagcagggcgtactcatcgattaatgacgtcgcaagctttgtggttttagttgacgttgcaggcatcgacatcgttcagcagtgcctccatgcggttgagtaaatcggtcagttgatgggtttttccacgcgcgcagacggctgcgctttgctcgcacaacaggcagcggcgaggcggcagtgaatagtcgcggcgggagagaatttcgccttcgggcgtcaggacatcgatatcccataaccgcccgagaggatgactatgttcaagctcaatggtggcgagcttgaggtcgcgagccggggcggcaatgctcaacatgccctccggcccgctggcggaaaccagtgcagcctgctcctgaatttgccagccctgttttgcggctaaggcacgcaaggctgtcacgccatgattaaaaattcggcgtgtgacctcgctgtctttaatcggcccaggcgcaaccacggtaaaggagaccagtggaacaggatggcgcttgagccagacgtgttgccgtgcttgcctttcatcccggctgacgagcagctcgggaattgacaccgcatggtggctggcgagttcaggaagcaggtgcatggcttattccttcacctgatgcacaacatcgatcaccgagccatcgcggtaacgcacaacggcaacgacgcggtcggtgaattcaatcggctgtggttcaccggtcagcagacgcgcacgttcgcgcagccactcaatggaaaccactttaatgcccgcttcctgcagacgttctgccagttccggacgtgccgggttaactgcgataccgtggtctgtgaccagaatatcgacactggagcccggggtgatgcaggtcagcacgttatccaccagagtcggaatacgaccgcgtaccagcggcgcgacgatgatggaaagcgcagaggcaatcgcggtatcgcagtgaccaccggaagcaccacgcagtacgccgtcagagccggtcagcacgttaacgtttaactgggggtcaatttacagcgcgctcagtaccaccacgtcgagacgatcaaccgatgcgcctttcgaaccccagttagcgtactggttggcgctgatttcgatgtgattggggttacgggccagcgattgcgcagcatggctgtcaaagctctgcacatccagcagtttgcggatcagacctttttcgtgcagatcaaccatcgtcgcggtaataccaccgagggcgaagtcggcgcgaatatcgcggctacgcattttgtcttccaggaaacgggttaccgccagcgatgcgccgccggtgccggtttgcatggagaaaccttctttgaagtagcctgagttgacaatcacatccgcagcgctacgggcaataagcagttcgcgcgggttagtggtcatacgggtagcaccagcgccgatttttgcagcatcgccaacgcgatcaactttgacgattaaatcaacctgatcttgctcaatgcttgccggattatgcggataaggcagcagttcttcggtaagcatcacaacctgttttgcgttgtcggcatcaaccattgcatagccgagggagccgcagcaggctttaccggtgtagccgttggcattaccgaattcatcacaggacgggacgccgaggaaagccacgtcgatattcagttcgccgctctgtaccagatgcacacgaccgccgtgagagtggatctgcaccggttccgccagcagaccgcgggagatttcttccgccagtggaccgcgtaggccagaggtataaatgcgggtaaccacgccctggcgaatgtgttctaccagcggcgcatggcaatcactcagggagctggacgccagggtcaggtttttaaagcccatcttcgcgatgacgtccatcaccatattgacggtcaggtcaccgccacggaaagcgtgatggaaggaaaccgtcatgccgtcctgtaaaccagagcgacgaatcgcctcttccaggttggcgcacagtttgcgatcgcgcgctttttcagcctggtaggtttgctttggcgagttctggaaagcggcaagatcgcattcagcgcgacgattccaggccgctacccgttcttgtcgttgagattgttcaattttctgcgtcattttgattgccttattcttcgcggatgccggaaagttctgcacgggagagcaccagacgggcgcgatcgataaccggaccgtccaccatcttgccgttcagggaaaccacgccgaggccttcgcgagcggcggcttcagcggcttctacgacgcggcgggcgtgatccacttctttctgggtcggtgcgtagaggttgtgcagcagatcaatctgacgcgggttgatcagcgatttgccgtcaaagcccagctgtttgatgtgggcggcttcttgcaggaatccggcttcgttgttagcgtcggaatagacggtatcgaacgcctgaatacccgcagagcgcgcggcctgcaaaatggaacagcgtgcgaacagcagttcagttccttccggggagcgttctgtacgcaggttgcgcacatagtcttctgcaccgagggcgataccgatcaaacgctcggaagcgtgagcgatttccactgcgcgggtaatgcccagcggagattcaatcgccgccagcaggccggtgctgccgggttcacgaccacaggctttttcgatacgcaggatctctttttcgatatccagaacatcctgagcggtatcggttttcggcagacgcacaacgtccgcaccaccgcgaacgacggcttccaggtcgttgacaccccattcggaatccagcgcgttgacacgcacaatggtttcaatatcgcgatacagcggatgttgcagcgcgtggtaaaccatgcggcgggcggtgtctttttcacgcaatgctacggagtcttcgaggtcaaacatcagggcatcagccgggtagatgaaggagttgctgaccatcgcggcattggcaccaggcacaaacaacatgctgcggcgggtgcgagttttacgttgttgcagcgaagcggaaatcattggcaatcctcccatggcagagccgggataccgctggcgcgtgccagcagggcttccagtcgtgcacgtaaaatgcagtccagtgcgcctttatcatcgacattcagctgtacgccgcgcacgttgtagcgggcgagaacgtccagaatggtggtgcgaattgcatcgccaaactgtttctcaacgctgctattgatttgcaggtcgatatcctgcgtatcgagtggggcgatgcgtatcatcacatccccagactcaagggtgcctgcaacggcgggctggtttattttcatttttcacctgtttctcatgcgggggtcttttgacgagctgccgcgtcctggcgggagtgctcaagcaggttctgcaaataatgcagcgtgactgcagggaccagcggcgcgatagccgtgagatcgtttttcgccagcagttgacgtacccgggaagcggatatcggcatctcctggtaacgcagccgctcaatttcaaccagttcgatgggcggtgcggagatagtcggcgtttccagccagtagcgcatatcctggttgtactgggcggtaacgcgacaaaagggttcagtaccgacaaagcggtgagttacacccagcgcgggagcgaggtactgacggaaaatcttcagatcaatttcggtgtaacaatggttaatgacgctctgttctttaatgaagtagcaagggaacgtagcgcgggagatgatgtattcggagccgcgatgcacagtcaggcgtggaatatcggcggtgccttttaacaccagatccaaccggtcttcataggggaagcgtgaagaatcttctttgactaaaaacagatgcaaccagtcgcactgtgccgcagcttgttgaatcagataacggtgaccattcgtgaagggattggcgttcatcacaatgcagccaatcttgttccctggatgacgaaattttttcagcgattcggcatagcgtttcagtcgcgtggcgctgttttccatcagcaccatcacgccgggtacgctggtcagcgtggaaaaaccgcactggcggaacagcgcctcgtattcggttttggtataaataaacagatgcgtgctgtgccgctcataggcgaggtttatcagttcagtggctaatgtcagcgccagtccttcaccgcgaacggattcactgatcgcaacgcatttaataatatttccggcaattccaccgcacgcgataagcttttcatcgcgggttacggtaataaatacttcgactgtggtgtcaacgctcaaatcattttcatgcaggaattgggcgatttccgccatttttttattttctgaacgttttacgcgggtgaaaatatcattgccgaacataataaatagtatcctgaaggtgcatgttgttatcgatttgcaacgaatgttgttcaatgttgcaaactgataaccttttattttcacttgggagaaaggggggtgatcgaggtatatctttttctcctttcgctatacatcctaaggagtatttctgcgtgaaattttgatttatttcacatagag

SEQ ID NO: 276 - DNA, 14074 bp, Escherichia coli
  source 1..14074: mol_type = genomic DNA
ggcatacacgccgctttcgcgcaggcacagcagcaccagcgggaacgggttacgacgaattttccaccacaccagcaatgggttaaccaccagcgccaccagtaacatacagccaaccagcacgaccagcagttgcgcgtagccccacagtgtggagaaaccggtggttgccagggtagaagaaaccagcccaaaaataccaatcggtgcgaagcgaatgaccagtttcaccataaaggtaacggcattcgacatatcgttaaccaggtttttggtggtctcgttaccgtgacgcagtgcgaagccgaggccgatcgcccacaccagaatcccgatgtagttacctttcagcagcgcgtcgatggggttggaaaccatgctcattaccagcccgcgcatcacttcgacaatgcctgacggcggcgaaatatcacccgcgctactggataaatgcagggtagaagggaaggcaaagctgaagactactgcggccagagcagcagagaaggtgcccagtagatagaggaacaaaatagggcggatattggttttctgcccgtgctggtggttagcaatagatgccattaccagcatcaacaccaggatgggggcaacggctttcagtgcgccgacgaacaaagtacctaacagaccaacagcttccgccgcgggttttgagatccatgccagaagaatccccagaacaaggccgaccaggatttgttttaccaggctgccatgagccagacgccggaatagccccggtgaacgttgcgtagtcatttttcgatcctttcattgtgttgtcgcacatccctggtgcgttctgtcgacgcatctttcaggatgtaacaaagtgtttgcaaggtcgagtataaggaaagttacagcttcgggaagcgaaaaatgctggattttaaagagaggtcatattttgcaacttaatggttacatttatttgacataaaaataaagccaacgtgcggcttccagactgatgacaacatcaaaaaaggactcggtcagtcccctcgccccgtttggggagagggttagggtgaggggaacaggccagcatcggtgcgaaaaattaccctcaccccgaccctctccctggaagggagagggagaaaacggtgctcatgttaatgacagggtacacggcttaggcagattaaaaattatccaccccgctgcttatcatgccgataattcacccaggcgttgataataaacgtcatcaccagaatgccaaacaccacgcccagcgagacggcgattggaatatggtagaagtcgacaatcagcatcttgataccgataaacaccaggatcaccgccaggccatatttgagcatcgagaaacgctctgctacgcccgccagcaggaaatacatcgcacgcaggccgaggatcgcaaacaggtttgaggtcagcacaatgaacgggtcagtggtcacggcgaagatagccggaatgctatccacggcgaaaatcacgtcgctcaattccaccagaatcagtaccagcatcagcggtgtggcgtacagcaatccattcttacgcacaaagaaatgctcgttgtcgatggtgtcggtcatgcgcaaatgaccgcgtagccagcgcaccagcggcttgtcgccaatgcctgattcatcttcatgggcgagcgccatcttcacgccggtaaacagcaggaaggcaccgaagatatacaggatccagtcgaactgcgaaattagccagctgccagtgaagatcatgatggtacgcagaacaatcgccccgagcacgccatacaccagcacgcggcgttgtaatgccgccggaacagagaaatagctgaacaacatcagccagacaaagacgttatcgaccgccagcgatttctcaatcagataacctgtgagaaaggccagtgcctgtggatcggcaacggcgcgaccttcggtttgcaccagataccaccagaaagcggcgttaaacagtaacgacagcgtcacccagaccagcgaccaggccgcagcctgtttcatggtcatggcatgtgccccacgacgcccctgcaacaacaggtcgatagccagcataatggcgacaacaacagcgaatccgccccatagcaacggcgtgccgacagtattcatagaagttccttacacataaaaaaacggccaacgtcggaagacgtcagccgctgctttttatgcatagacctcgccttccggcaaggtctcacttacaacaaaaaaggaatacgtctgcgtattcctttcgggttgcccggtgaccggatgtggtttttcacacatcgtaatgacgatcgaccggcaatgaagttactcccctttgcaggtaacaaagtatgacagaccattcagccagtcaatggtctgttacataccttttacactgttttactttggcaattatagttttacgctatctgccggaaaaatcaccccagtctggcggcggatctcggtcagcagtttggcggtgatgcgactgaccgccagccccggatgatccaccagatgctcatccaccagggtagcgaacagctctgcttcgtagagcatggtattaatatgctgcggctgggtgagatcctgcatttggctgccacgcggcacgaagcacactttctggcattcagacagtttttcaatcaccagcgatcctgcttcgccctgaatctcgctcgccaggacagaatcactgacttttgagtgctgcaaggtgacgctgaaatcaccgtaatccatcaccaccacgccgtgggcatctacaccgcttgccagcaaactggcggttgcctgcacgcttttcggctcaccaaataacgccaccgccgacgccaggcagtaaaagccgatatccataattgaaccgttagagaatgacggattaaaggtgttgggattttcaccgtccaggtaacgtnnnnnnnnnnaatagcgcgaggaatactggcaatagttgaaaaagactttacgcaatttgccgactttcggcagcgcctggcgcagcaaatgaaagttcggcaggcaggcggttttaaatgcctcaaacagcaccacctgattttcccgcgcacaggcaatggcggcatccacttccgccagattcgacgccagtggtttctcgcaaatcacatgaattttatggctaaggaaaagttgtgtctgggaaaagtgcagggcattcgggctggcaatatacaccgcgtcaatggcatcgctttccgccatcgcttccagcgaggtaaacagatgctcgacagaaaaatcattggcgaagtgctgagcctgctcaaggctgcgggaatatacggcggttaacttgtatttaccgctctcatgggcggcctcgacgaactggcgagtgatccagttcgtaccaatcacagcgaaacgtatcataacgcgtggatactccataaagggattctgtcgtcaatgtagcacgcctttttcatcttcgacgtgcgcagatacgcattattcttttgccggacagccatgctcactaaacggcccaatcatgaccgatggcccgagatatttcggctggcgatggaggattttggcgtcaatcacggcgctgacacgagcgagtttctcccgcagttgagtataaaaaccgtgcttcatattgaggtcaggcgcgttaaaaccgatagcgtcgatgccgtactgttttgccagccagatggcgcgttgattatgaaattcttgcgagataatggtgatatggttttcaccaaaaacctttttggcacgcactaccgaatccagcgttgagaatccggcatagtcgcagaagatcactttcgccggtacgcctttagcgatcaaagcctgctgcatacctgaggcttcatcgtaatttttacgtccgttatcgccacttaccagtagccatttcacttttccggcgtggtacaacgctgctgcggtatcaatacgtcgggtaaagtagcgattacccggcctggcccccagcaataagcccacgttacgcgccggaactgcgttgacatcgctccaggtcagctgcttgctggcgttgaccataacgcgatcggcaataaaaatggtcgctcctgctataagcaacaacaaacagccaatcttaagagtccggcgagaaaaacaaatacggagaagaaggcggggctgcatggtcgttatccttaacgaaaggggggaggtcgattttaggcgctaaagaaagaaaagataacgcctgacatcattttcagattttgtcctgcccaagcgacaactgcgttagccacagccgggtgtcgaactcaagctggtggtactgcggctccatatggcagcacaactggtaaaacgctttgttatgctctttctccttcaggtgcgccagttcgtgcaccacgatcatacgtaaaaacggttccggcgcgttgcgaaacacagtagcgacgcggatctctgcttttgctttcagcttgccgccctgcacacgagaaacagcggtatgtaacccgagcgcgttttttagcacatggatcttattgtcatacatcactttattgatcggcggggcattgcgcagaaactgattttttagatcctgagtatattgccagagggctttatcggtggcgtagtcgtgtgttcccggatagcgttttgccagcacatcgcccagacgctgttcgttaatcagcgttcgcacctgggaaagtagctgctcgggataaccctgaagataagtaagattgctcataaccgcccacgaaaaagagaaaaagggtatactcacgcacccttttcaggggcaacgtcgaaattttatcattcaggagggccgatgagccacttagacaacggtttccgttcactgacactacaacgttttccggcgacggatgacgttaacccgctacaggcgtgggaagcggcggatgaatatttgctgcaacagttggacgacacagaaatccgcggcccggtgttgatcctgaatgatgcctttggtgcgttaagctgcgcgctggcggaacataagccgtacagcattggcgactcatacatcagtgaactggcgacgcgcgagaatttacgcctcaacgggattgatgagtcgagcgtgaagtttctcgacagcaccgccgactacccgcaacagccgggtgtggtgctgatcaaagtgccgaaaacactggcattgctggaacagcaactgcgtgcgctgcgcaaagtggtcacgtcggatacacgtattattgccggtgccaaagcccgtgacattcacacttccacgctggagctgttcgagaaagtgctcggcccgaccaccactacgctggcatggaaaaaagcgcgcctgattaattgcactttcaatgaaccgccgctggccgatgcgccgcagaccgttagctggaagctggaaggtactgactggactatccacaaccatgcgaatgtcttctcccgcaccgggctggatattggcgcacgcttctttatgcaacatctgccagagaatctcgaaggtgagattgtcgatctcggctgtggtaacggcgttattggcctgacgctgcttgatacacacccgcaggcgaaagtggtgtttgtcgatgaatcgccgatggcggtcgcttccagccgaatgaatgttgaaaccaacatgccagaggcgttggatcgctgcgagtttatgatcaacaacgcgctctccggagtggagcctttccgctttaatgctgtgctctgcaacccgccgtttcatcagcaacatgcgctgaccgataacgtcgcctgggagatgttccaccacgcccgccgctgcctgaaaatcaacggcgaactgtatatcgttgccaaccgtcacctggattacttccataaactgaagaagattttcggcaactgcaccaccatcgccacgaataataaatttgtggtgctgaaaacagtgaagctggggcgtcgtcggtaagattgggagttacctgccggatgcggcgttaacgccttatccggcctacgttcagcacgttactcccaggccggataagacgcggcaagcgtcgcatccggcaatgtctgcccagttctggaatcgcgcttccataaaacaaaaaatccctgtcaccatcctctacattctcttgtttagcgttgttcaacgtttatgctacatacgtgaagttatgacgcataaagaatacgatttctttaccgctgttcatcgtactaaggggaaaaaatgattgcgattgccgacatcttgcaagcaggagaaaagctaactgcggtggcaccttttctggcgggtattcagaacgaggaacaatacacccaggcgctggaactggtagatcatctgctgctcaacgatcctgaaaaccccttgctggatctggtgtgtgccaaaataaccgcgtgggaagaatcagcgcccgaatttgcggaatttaatgccatggctcaagccatgcctggcggtatagccgtgattcgtacccttatggatcaatatggtttaaccctttccgatctgccggaaattggcagtaaatctatggtgtcacgcgttttgagcgggaagaggaaattaacgctggaacacgctaaaaaattggcaacgcgattcggcatttctcccgccttgtttattgattaacgcgacgtgccggatgcgttgcatccggcgcttcaaataacgatttaaatctccagcgccagccgtgttccctgggcaattgcccgtcgtgcgtccagctccatagccacatcgcagccgccaattaaatgcacagttttcccgctatcaatcagcgcttgcgccagcgcgcggtttggctcttgccctgcgcagatcaccacattgtccactgctaatacctgcgtttcgccgttgatcaccacatgcagcccgtcatcgtcaatcttctgataacttacgcttgggatcattttcacaccccgcgagagcagggtggtgcgatggatccagccggtggttttgcctaacccctgtcccggtttgctggctttgcgctggagcatcacaatttgccgtgggctacgcgggatctgcattccctgcgggcttaagccaccagcctgttgtaggctgctgtcgatcccccactcattacagaacctggcgatattctggctggtggattcgcccggctgacttaaatacatcgccgtatcaaaaccaatcccgccacaaccgatgatggcaaccttgttgcctaccggcgctttgtcgcgcagtacatcgagataactcaataccttcggatgatcgatcccgtcgataggcggaacgcgcggcacgatcccactggcgaggatcgtttcatcgaacgcctgtaactgatccgccgtcacggtgtgattgagtttcagcgtcacgcccgtcacttcgatcatccggtggtaatagcgcagcgtttcgtaaaactcctctttgccggggatctgtttggcgatattaaactgcccgccgatctcgctgtgggcatcaaacaatgttacctgatgcccacgcgccgccgcgttaatggcaaacgccagcccagcaggtcccgcaccgaccaccgccagattttttttctgcacggcaggaaggattggcattttggtttcgtggcaggcgcgaggattcaccaggcacgaggtgactttgccaacgaagatctgatcgaggcaggcctgattgcagccaatgcaggtgttgatctcatcggctcgccccgattgcgcttttgacagcagttccgcatcagcaagaaacggtcgtgccatcgacaccatatcggcatcgccgcgcgagagaatgtcgtcggcaacctgcggatcgttaatccggttggtggtcaccagcggcagcgagacgtggcctttcagtttgcgcgtgacccaagtaaatgcgccgcgcggcacgggcgtggcaatggtcggaatacgtgcttcatgccagccaatgccggtgttgataatggtcgcgcccgccgcttcaatggcctgcgccagttctaccgtttcggcaaaagtgccgccgccttcgaccaggtcgagcatcgacaaccggtagataataatgaagtcgttgccgacgcgttcgcgcaccgcacgcactacttctacggcaaatcgcatccggttgcggtaatcgccgccccactggtcactacgctgattggtgcgcagcgtcagaaattcgttgatcaaatacccttcggagcccatcacctctacaccgtcgtatcctgcctcccgcgccagttgcgcgcagcgggcgaaatcgtcgatcagttgcaggatctcttcatgggtgagttcgtgaggaacgaaacggttgatgggggcctgaaatgcggagggagcgaccagatgcggttggtagctgtagcgcccggtatgcaaaatttgtaaggcaattttgccgccttcctgatgtacggcttcggtaatggtgcgatggtgtgggatctggctggcgtcattgagcattgcgccaccttccatgccgacgcctgttaaatctggtgcaatgccgccgctaacaatcagcgccacgccgtgacgggcgcgttcggcataaaacgcagccagccgttcagcaccgtccgggtattcctccagcccggtgtgcattgaacccatcaacacgcggttttttaacgtggtaaaacctaaatccagcggggcgaacagcgacgggtagctcataaaattgtccagtatgtaaaataattgttatgtggtcggatgagttctaatttagccgtcgccggagaaaagggaaaaggggagtgcggggtttgtgatgggattcaaaaagaatacgcccggtggtaacgccggatgcgacgcttgccgtgttttatccggcctgggggattgcacatgtagggcggataaggcgttcacgccgcatccgccagtggcgcggtgcagttgccggatgcaacgcttgccgcgttttatccggccaggaggattgcacatgtagggcggataaggcgtttacgccgcatccgccagcagttgcaaattattgcttacggaaaaaatcgttatacaacatatacaaatgcgcggcactccaggagaaatttggtgcgccttgctgtgcgcctgtcagcgggttgtaattttcctgaattggtccatcggcggttaaccctttggcgtgccggaagaacgtatccgccagcttcagggcatcatcacgataaccgtaacgctccatccctttcagaccaaaccagaactgatccacccatacgcgcccacgccagtagatatcagcgccaaaagccggattggttaacgccgccgttcccagcgggacaaaggtgttgaactctttaggatcgagcatcaccttcaccaccgcgtcggcgttggcctgcgttgccgcaccgttaaacagcggcgaccagccttccggccctttaccgcgctcaacaatcggtttgcccgcgcagccgttcgccagcggtttatcttcaatacgcacgtcatagtagaactgggtagtcgggtcgaacatacaggtgttgatgtagtccgcgagctgctgtgccaactggcgatagcgtttggcctcttctggcttaccgaggatggttgccatctccgccagataatggttatcgctgtacatatagctggcctgatccaccgactcctgcaatagcgagtagcccagcaacgttccgtcctgactgcggttttcggcgaatttcaccgtccagtcgctacgtttgccgccattagcgacatatttatccaactgttctttgtcgataaacccaaagacggcggcatcatcacgccccgattcccacgatgcagcaacctgtgccggaatttccagactgtcgtactggcctttctccaccacgcgggcgtagttgttcagcccagactgcgtctcttctttatcgccttttttcaccgtaaacagcatctcgccgctctcagtgttgtgggctttgtcgcgggtcgcgccatattccggcacgccgttgccgttgtgatcgcggttacgtaaccaccagtcgtgataggccaccagtttcgggtacatctctgccacccaggttttatcttgggtgacgttatacacttccatcaccgaccaggcggcaaggctgggtttggtattacgttcgttccagttgccgccatcgccaccacgctcggggctaaggttccacgctatcaggtcggggacaaagcccacatcctgcggacgcacgcggtcgcctggctggatctgccaggagaagaccgcgcggatattctctttggcgatgtccggattgaaatgcgccatcgcaaacgcctgcttccaggtatcccacggccaggtctgattgccggagaaccagcgcccggtcaccgacggtgtgacggtgttaaatttcaccgccccgccaggcgaacgccagttaccgttgagcgtttcgatcgctttcaccgcgacgcgcgtctgttccggcgtcgcatccggattggttaaccctttcttcagatactcttcccagcgttgctgcgaggcggtgagataaaacgccggacgcgccagaatatcgcggatctgcatttgctctttgctaacttcctgagaggtcagcagatgggaataggtggtatagagcgtcgtcgaaccgttgatatgtgccttactggtaaagcgattgccgttgatttcagtctgcaccggcagggatttatgcacctgatattctgattcaccggaggtcagcagatcccaggtggcgcgcactttgccaaaggtgactttcaggccatcacgggtggcgctgattttgcgctggtagtcagggtattcgccagcaatggttttatcggaaagcggtttcccttctttcgcttccagtttttccagcagttcgccatcccacaccagatccagcggtttattgctgatgattttagtttccagtagtgacgtgcgcggcgtggcgaagcgcagagtcatttcgacctgcacatcttttgctgtcagtttttgcaccagcgcgccgggaatactgtatgcctccagcgtgaagtcgactttcttgccgtcctgccagacggtcaggtggtcgaaattgctggccataaagttgatgtactcttccgtcagcagcgcaacgcctggaaaaccgcccatggtgttagggccgtctggcaacagatgaccatgccaggctccgagatcgaaaaacggattaaaacgctgatgatcgtcgtaatcgtaatccttcatgtactgcggcgcaccagtacggttaatcacgtttttataattgtcggcgttagcggcatgggcggaaaaacttatcagcagagcgcaggttactggcgttaaaatagttttgattttcatgaaattacagtccttattaccagtagaaatattgcatcaggaagatttggtcgctgggatcgtgagaggcatttttcatgtagaagcggctatcaaaagccgttgcgaaacgtccgccgccgtattcgtaccagataccaaactgcatgaaagaggtggtttcatcgtcagcgtggtcagggcgatgtttggcgtaggtgtaagcggtggagagataaacgccctttaatgcttcatacatggcgctcaccatcatcccactttcacttcccggtacgtccagcccgtcggcacgtccggtatggtgccaggcgcgagcggcaaagttaggggtaagcaggccggtgagatagagttgtcctgtgccgtcggtaatttccagaccattcatccaggtgatgccttcggcaaggtcatactggatgtaaccgttcatcattgccggataggtgtatttgtcgtcgtagcgatcgtacttgccaaaatgtagccaggctttgctttcgtcatgatgtccggcaggtgtggcggtgacgctataacgaaagttgccgcttaagttttgcaccttcagcgcagtcataatgtcgcgggtattgggaatgacgtagcccagatcgggcgtgaaatcgccccaccattgcaggtcatccagcgaggaatcctgacgcagactgagcatgatttcggtgccatcattggtacgataaccgccatagaaacggttaattccgccctcgaaaccaccccagctatggtcaggcacccaggcattgccgtcgtggtcggcctgcacggtccagccttcgccgtaaatcaggccgaaccaggagccgtacttcatctccaggccaccttcaatataggtgccgtcactgtatttatgtttattctcaccctctaaatccatatatccaccaacccctaattcgccgtaaaaacgaaatgaaggagaagatgtcgaggtaatggcgggtgtttttgtgtcgtcatgttctgccggacgtgcttcttctcctgccgcagaaaaggcgtagcaaaacggcagagcaagtaatgctctgcatggtgcagtgattaatttcattgtgttaatccatgagctaaagaaaaagtacagccttttatcgttgtaattataaaaatataaaggcagaaactattttccctctcctcatccaggaagagggaaaatgcctgctcattttttattattctgcttaatcaacattgctggctggcgtcgcttcaatatggcgctcttcagccgttaatccctttatatatttactgtatttccaccacgcaaagccaaggaagataacaataccgccgacgttataaaaaatgatggtcagaatattcgcgccagtcgggaatgtcgaagcgacaaaccctacggcaaatatcgcaatcagcattgaaacaacgataataccggtgcggcgggagcccatacggaaatcgcgtggcaggtgatctaatttggcgcgtaaattcaggtaagccagcatgatgaataacggcggaagcatggacgctgcggcagtcatattaataatagtattcatcagatcctgcacggtattggaaccgagcatcgggataatcatcagcgggatgacgatcaggaactggatccacgctgcgcgcgccggaacgccgttttcgttcagttcgacggttttcttaccaaagatgccttccgggatttcggagaagaaaattttcaccggcgttgcggtccacatcagcagggaaccgaacatcgcggtaaaggacaccagaccgacaaagcgattcatcaacgcttccggtagaccaaaatacgccgccatgccgtggaatacctgcaccgatccgccggtaaatttcaactctttgctgctgacgaagacgttaatcagcaccgaggagacggaatacagtacgccgataaaaatcccggcgaggatgatcactttaacgaacgatttcgaaccgcctttgacgtcgttaacgtacacagcgacggactccgcgccacctgcggccataaagatccaggtggtaacgccgaggaacgcccagttgaagttcgggatcatcgcgtcaacggtgatggggtcagcaggctgtacgccgccaaccagcgccgtacctgccagtaaaatgtaggagagcgttaacagcagcatcagcgttgaagtgacggaggtaattggccccaacattttcgccccgttggtggaaacccaggtggagaaggcgaacagcaccatactgataatggtggtggcaaccggcgtcataatatattcgtagccgaggaaggcatacgaagcataagcaataacgcgcggcaacagtgaggtgaaaaagaacaggtttacgaaccagtaggtataggcagtaataaatgcccaacgtccgcccagcgaactttttacccacgcgtagacaccggcttctgagtttttatttaacgaaacaaattctgcgatgatcagacagaagggaataaaataaaaaatcgtcgcgaggaaaaacatcggtgccgaggccagtccaagctcaatattattattgataacgttgttaaagctgtaaacggcggcaaaagtcagcgagagcaagccgaatttgccgattgtattacgtttggtatcagacataacac

SEQ ID NO: 277 - DNA, 14038 bp, Escherichia coli
  source 1..14038: mol_type = genomic DNA
ggtttatttataataaaatttgagaacttgctcattaaatttaactcaaattttgcctggtaattatccggtaattgcttgaaatatggtctcagccccttttttatattaaccacataacgaatgatgttatcgccataaaatatggttatccccgtcattttttttgacaaaaatcagggtttatgctgatttttatactttaacttgttgatattttaaggtatttaatttgcgtaacgataccatggaaagtattgaaagttaatttgtgagtggtcgcacatatcctgttcatttcattttgatacacttcatgccgtcaatgaggtaattaacgtaggtcgttatgagcactattcttcttccgaaaacgcagcacctggtagtctttcaggaagtcattagaagtggctctatcggctcggctgcaaaagaattagggttaactcaaccggccgtcagtaaaatcattaacgatattgaagattattttggtgtggaattagtggtgcggaaaaataccggtgtaacattaacacctgccggtcaattgttactctcccgttccgaatccattacccgtgaaatgaaaaatatggttaatgagataagcggtatgtcttctgaggcggtggtggaagtctcatttggttttccttcattgattggttttacttttatgtcagggatgatcaacaagttcaaagaggtgttcccgaaagcgcaggtttctatgtatgaagcgcaactgtcttcgttcttaccggcaatccgcgacggtcgactggattttgcgattggtacgttaagtgcagaaatgaagcttcaggatttacatgttgagccgctgttcgagtccgagtttgtgctggtagccagtaagtcccgaacatgcaccggcaccaccacgctggagtcgttgaagaacgaacagtgggtgttgccacaaaccaatatggggtactacagcgagcttcttactacgttacaaagaaatggcatcagtattgaaaacatcgttaaaaccgactcagtcgtgacaatttataatcttgttctcaatgctgatttcttaactgtaattccttgtgatatgacgtcaccttttggttcaaatcaatttattactattccggttgaagaaacattacctgtggcacaatatgccgcggtatggtcgaaaaattatcgtattaaaaaagcagcatcggttttggtggaattagccaaagagtattcatcttataatgggtgtagacgaaggcaattaatagaagttggttagttatttgtttttatttaaacataaataatccacctgtctgttttgcaggtgtcggttacggttacctacatatttaattcaggcgaagaggttttataatgcatattacatacgatctgccggttgctattgatgacattattgaagcgaaacaacgactggctgggcgaatttataaaacaggcatgcctcgctcaaactattttagtgaacgttgcaaaggtgaaatattcctgaagtttgaaaatatgcagcgtacgggttcatttaaaattcgtggcgcatttaataaattaagttcactgactgatgcggaaaaacgtaaaggtgtagtggcctgttctgcgggcaaccatgcgcaaggggtctcgctctcctgcgcgatgctgggtatcgacggtaaagtggtgatgccaaaaggtgcgccaaaatccaaagtagcggcaacgtgcgactactccgcagaagtcgttctgcatggtgataatttcaacgacactatcgctaaagtgagcgaaattgtcgaaatggaaggccgtatttttatcccaccttacgatgatccgaaagtgattgctggccagggaacgattggtctggaaattatggaagatctctatgatgtcgataacgtgattgtgccaattggtggtggcggtttaattgctggtattgcggtggcaattaaatctattaacccgaccattcgtgttattggcgtacagtctgaaaacgttcacggcatggcggcttctttccactccggagaaataaccacgcaccgaactaccggcaccctggcggatggttgtgatgtctcccgcccgggtaatttaacttacgaaatcgttcgtgaattagtcgatgacatcgtgctggtcagcgaagacgaaatcagaaacagtatgattgccttaattcagcgcaataaagtcgtcaccgaaggcgcaggcgctctggcatgtgctgcattattaagcggtaaattagaccaatatattcaaaacagaaaaaccgtcagtattatttccggcggcaatatcgatctttctcgcgtctctcaaatcaccggtttcgttgacgcttaattaattcgttgaggataggatatgagtacttcagatagcattgtatccagccagacaaaacaatcgtcctggcgtaaatcagataccacatggacgttaggcttgtttggtacggcaatcggcgccggggtgctgttcttccctatccgcgcaggttttggcggactgatcccgattcttctgatgttggtattggcataccccatcgcattttattgccaccgggcgctggcgcgtctgtgtctttctggctctaacccttccggcaacattacggaaacggtggaagagcattttggtaaaactggcggcgtggttatcacgttcctgtacttcttcgcgatttgcccactgctgtggatttatggcgttactattaccaatacctttatgacgttctgggaaaaccagctcggatttgcaccgctgaatcgcggctttgtggcgctgttcctgttgctgctgatggctttcgtcatctggtttggtaaggatctgatggttaaagtgatgagctacctggtatggccgtttatcgccagcctggtgctgatttctctgtcgctgatcccttactggaactctgcagttatcgaccaggttgacctcggttcgctgtcgttaaccggtcatgacggtatcctgatcactgtctggctggggatttccatcatggttttctcctttaacttctcgccaatcgtctcttccttcgtggtttctaaacgtgaagagtatgagaaagacttcggtcgcgacttcaccgaacgtaaatgttcccaaatcatttctcgtgccagcatgctgatggttgcagtggtgatgttctttgcctttagctgcctgtttacgctgtctccggccaacatggcggaagccaaagcgcagaatattccagtgctttcttatctggctaaccactttgcgtccatgaccggtaccaaaacaacgttcgcaattacactggaatatgcggcttccatcatcgcactcgtggctatcttcaaatctttcttcggtcactatctggggacgctggaaggcttgaatggtctgattctgaagttcggttataaaggcgacaaaactaaagtgtcgctgggtaaactgaacactatcagcatgatcttcatcatgggctccacctgggttgttgcctacgccaacccgaacatcctcgaccttattgaagccatgggcgcaccgattatcgcatccctgctgtgcctgttgccgatgtatgccatccgtaaagcgccgtctctggcgaaataccgtggtcgtctggataacgtgtttgttaccgtgattggtctgctgaccatcctgaacatcgtatacaaactgttttaatccgtaactcaggatgagaaaagagatgaatgaatttccggttgttttggttattaactgtggttcgtcttcgattaagttttccgtactcgatgccagcgactgtgaagtattaatgtcaggtattgccgacggtattaactcggaaaatgcattcttatccgtaaatgggggagagccagcaccgctggctcaccacagctacgaaggtgcattgaaggcaattgcatttgaactggaaaaacggaatttaaatgacagtgtggccttaattggccaccgcatcgctcacggcggcagtatttttaccgagtccgccattattaccgatgaagtcattgataatatccgtcgcgtttctccactggcacccctgcataattacgccaatttaagtggtattgaatcggcgcagcaattatttccgggcgtaactcaggtggcggtatttgataccagtttccaccagacgatggctccggaagcttatttatacggcctgccgtggaaatattatgaagagttaggtgtacgccgttatggtttccacggcacgtcgcaccgctatgtttcccagcgcgcacattcgctgctgaatctggcggaagatgactccggcctggttgtggcgcatcttggcaatggcgcgtcaatctgcgcggttcgcaacggtcagagtgttgatacttcaatgggaatgacgccgctggaaggcttgatgatgggtacccgcagtggcgatgtcgactttggtgcgatgtcctgggtcgccagccaaaccaaccagagcctgggtgacctggaacgcgtagtgaataaagagtcgggattattaggtatttccggtctttcttcggatttacgtgttctggaaaaagcctggcatgaaggtcacgaacgcgcgcaactggcaattaaaacctttgttcaccgaattgcccgtcatattgccggacacgcagcttcattacgtcgcctggatggaattatattcaccggcggaataggagagaattcaagcttaattcgtcgtctggtcatggaacatttggctgtattaggcgtagagattgatacagaaatgaataatcgctctaactcctgtggtgagcgaattgtttccagtgaaaatgcgcgtgtcatttgcgctgttattccgactaacgaagaaaaaatgattgctttggatgccattcatttaggcaaagttaacgcgcccgcagaatttgcataatttagttgaagtattgtagagagattatttttcatgaaggtagatattgataccagcgataagctgtacgccgacgcatggcttggctttaaaggtacggactggaaaaacgaaattaatgtccgcgattttattcaacataactatacaccgtatgaaggcgatgaatctttcctcgccgaagcgacgcctgccaccacggaattgtgggaaaaagtaatggaaggtatccgtatcgaaaacgcaacccacgcgccggttgatttcgataccaatattgccaccacaattaccgctcatgatgcgggatatattaaccagccgctggaaaaaattgttggcctgcaaacggatgcgccgttgaaacgtgcgctacacccgttcggtggcattaatatgattaaaagttcattccacgcctatggccgtgaaatggacagtgaatttgaatatctgtttaccgatctgcgtaaaacccataaccagggcgtatttgatgtttactcaccggatatgctgcgctgccgtaaatctggcgtgctgaccggtttaccagatggctatggccgtgggcgcattatcggtgactatcgccgcgtagcgctgtatggcatcagttatctggtacgtgaacgcgaactgcaatttgccgatctccagtctcgtctggaaaaaggcgaggatctggaagccaccatccgtctgcgtgaggagctggcagagcatcgtcatgcgctgttgcagattcaggaaatggcggcgaaatatggctttgatatctctcgcccggcgcagaatgcgcaggaagcggtgcagtggctctacttcgcttatctggcggcagtgaaatcgcaaaatggcggcgcgatgtcgctgggccgcacggcatcgttcctcgatatctacattgagcgcgactttaaagctggcgtactcaatgagcagcaggcacaggaactgatcgatcacttcatcatgaagatccgtatggtacgcttcctgcgtacaccggaatttgattcgctgttctccggcgacccaatctgggcgacggaagtgatcggcgggatggggctggacggtcgtacgctggtgaccaaaaactccttccgctatttgcacaccctgcacactatggggccggcaccggaacctaacctgaccattctttggtcggaagaattaccgattgccttcaaaaaatatgccgcgcaggtgtcgatcgtcacctcttccttgcagtatgaaaatgacgatctgatgcgtactgacttcaacagcgacgattacgcgattgcctgctgcgtcagcccaatggtgattggtaagcaaatgcagttctttggtgcacgcgctaacctggcgaaaacgctgctctacgcaattaacggcggggtggacgagaagctgaagattcaggtcgggccgaaaacagcaccgctgatggacgacgtgctggattacgacaaagtgatggacagcctcgatcacttcatggactggctggcggtgcagtacatcagcgcgctgaatatcattcactacaagcgcgacaagtacagctacgaagcttcgatgatggcgctgcacgatcgtgatgtctatcgcactatggcatgcggcatcgcgggcctgtcggtggcgacggactccctgtctgccatcaaatatgcccgcgtgaaaccaatccgtgacgaaaacggcctggcggtggactttgaaatcgacggtgaatatccgcagtacggcaacaacgacgagcgcgtagacagcattgcctgcgacctggttgaacgctttatgaagaaaattaaagcgctgccaacctatcgcaacgccgtccctacccagtcgattctgactatcacttctaacgtggtgtacggccagaaaaccggtaatacgccggacggtcgtcgcgccggaacaccgttcgcgccgggcgctaacccgatgcatggtcgtgaccgcaaaggtgccgtggcctcattgacgtcggtggcgaaactgccgttcacctacgccaaagatgggatctcgtacaccttctcaatcgttcctgcggcgctgggcaaagaagatccagtacgtaaaaccaaccttgtcggcctgctggatgggtatttccaccacgaagcggatgtcgaaggcggtcaacacctcaacgtcaacgtaatgaatcgggaaatgctgctggatgccatcgagcacccggaaaaatatcctaacctgacaatccgtgtctctggctacgccgtgcgcttcaacgcactgacccgtgaacagcaacaggatgttatttcacgtacttttacccaggcgctctgacgccggaggatgtatgaaaaagattatcgaaacgcaacgtgccccaggcgcaatcggcccttatgttcagggcgttgatttaggcagcatggtcttcacctccgggcaaattccggtttgcccgcagaccggtgagatcccggctgatgtgcaagatcaggcgcgtttaagcctcgaaaacgtcaaagcgatcgtggttgctgccgggctgagcgtgggcgatatcatcaagatgaccgtgttcatcaccgatctgaatgattttgccaccatcaatgaagtctataagcagttcttcgatgagcatcaggcgacttacccgacccggagctgtgtgcaggttgcgcgtttgccgaaagatgtgaagctggaaattgaagctatcgcagtacgtagtgcgtaaagcctcgtgagcgggacggtcgcaaggtcgttccgctccacttcactgaacggcaatccgagggtgtggatatgattagtgcattcgatattttcaaaattgggattggtccctccagttcgcataccgtggggccaatgaatgccggaaaaagttttattgatcggctggaaagtagcggcttattaaccgcgacgagccatattgtggtcgatctgtatgggtcgttgtcactgacgggcaaaggccatgccacggatgtcgccattatcatgggactggcaggaaacagtccgcaggatgttgtcattgatgagatccctgcatttatagagttagtaacgcgcagcgggcggctgccagtggcatctggtgcgcatattgttgattttcctgtagcaaagaacattatcttccatcccgaaatgttgcctcgccatgagaacggaatgcggatcactgcctggaagggacaggaagcgctattaagtaaaacctattactctgtcggcggcgggtttattgtcgaagaagaacacttcggcctgtcgcacgatgtcgaaacgtccgtaccttacgatttccactcagcaggtgaactgctgaaaatgtgtgattacaacggcctgtctatatctggcctgatgatgcacaacgagctggcgctgcgcagcaaagcggaaattgacgcagggtttgcccgtatctggcaagtgatgcatgacggtattgaacgcgggatgaacactgaaggcgtgctgcctggtccgctcaatgtgccgcgtcgtgccgtagcgctgcgtcgtcagctggtttctagcgataacatctctaacgatccgatgaatgtcatcgactggatcaacatgtacgcgctggcggttagtgaagaaaacgcagctggcgggcgcgtggtaacggcaccgactaacggtgcgtgcggcattattccggcagtgctggcttattacgataagttccgtcgtccggtaaacgagcggtcaattgcccgctattttctggcagcgggggctattggcgcgctgtataaaatgaacgcctccatctctggcgcggaggtcggctgtcagggggagattggcgtggcctgttcaatggcggcggcagggttaactgaactactgggcggcagtccggcgcaggtatgcaatgcggcggaaatcgcgatggagcataaccttgggctgacctgcgatccggttgccggacaggtacaaatcccgtgcattgaacgtaatgccattaatgccgtgaaagcagtaaacgccgcgcggatggcgatgcgccgcacctcggcaccgcgtgtttcactcgataaagtgatcgagacgatgtatgaaaccggcaaagatatgaacgataaataccgcgaaacatcacgcggaggactggccattaaagtggtctgcggctgacattgctgtcagctttcatccttgggtgcacaaatgtgcaccttttttttgtgatctgccgcaaatagagaatgaatattctcttgcgattaatttagtagaaaattcttatccatctccgttatttcaaagtcttgattgtgaagattttctctgacctcgcgcgtatcatttctttattctaataactcgcctgcaaaaacgtagaccgcatatcgccttgatgcggctcggaaaaaaataataagccctacaaaatattgagcgagaaattatggaaattgcatcgaataaaggcgtcattgcagacgcttcgaccccggcgggtcgtgctggaatgagtgagagcgagtggcgagaagcgatcaaattcgacagtactgacaccggctgggtgattatgagtatcgggatggcgattggcgcggggattgtttttctcccggtgcaggtcggtttgatgggattgtgggtatttttgctctcatcggtgattggttacccggcaatgtatctgtttcagcggttgtttattaatacgctggcagaatcaccagaatgtaaagattacccgagtgtcattagcggttatttaggtaaaaactggggcatcctgttaggtgcgctctatttcgtaatgctggtgatttggatgttcgtctattccaccgccatcaccaacgatagtgcttcctatctgcataccttcggcgtgacggaagggttgctgtcagacagtcccttttatggtctggtactgatttgcattctggtggcgatctcttcacgcggcgagaaattgttattcaaaatttcgaccggcatggtgctgaccaagctgctggtggtcgcggcgctgggcgtgtcgatggtgggaatgtggcatctgtataacgtcggttcgctaccgccgctggggctgctggtgaaaaacgccattattacgctgccgtttaccctgacgtcgattctgtttatccagacgttaagcccgatggtgatctcttatcgctcgcgggaaaaatcaattgaagtggcgcggcataaagcattgcgggcaatgaatatcgcgtttggcattttgtttgtcaccgtctttttctacgccgtgtcgttcacgctggcgatgggacatgacgaagcggtaaaagcctatgagcagaatatttccgcgctggcgattgccgcacagtttattagcggtgacggcgcagcgtgggtgaaagtggtcagcgtcattctcaatatctttgctgtcatgactgcattctttggcgtctatttaggctttcgcgaagcaacgcaagggatcgtaatgaacatcctgcgtcgcaagatgcctgccgagaagattaacgaaaatcttgttcagcgcggcatcatgattttcgccattttgctggcctggagcgccatcgtactgaacgcaccggtgttgagcttcacctctatctgtagcccgattttcggcatggtagggtgcctgatcccggcgtggctggtttacaaagtaccggcattgcacaaatacaaagggatgtctctgtacctgattatcgtcactggtttgttgctttgtgtttctccgttcctggcattttcttgatttacctgaaattttaaggtttttaatatgtttgattcgactttaaatccgttatggcagcgttacatcctcgccgttcaggaggaagtaaaaccggcgctgggatgtactgaaccgatttcactggcgctggcggcggcggttgctgcggcagaactggaaggtccggttgaacgtgtagaagcctgggtttcgccaaatctgatgaagaacggtctgggcgtcaccgttcccggcacgggaatggtggggctgccgattgcggcggcgctgggggcgttaggtggaaatgccaacgccgggctggaagtgctgaaagacgcaactgcgcaggcaattgccgatgccaaagcactgctggcggcggggaaagtctccgttaagatccaggaaccttgcaatgaaatcctcttctcacgcgccaaagtctggaacggtgagaagtgggcgtgtgtcaccatcgtcggcgggcataccaacattgtgcatattgagacgcacaatggtgtggtgtttacccagcaggcgtgtgtggcagagggcgagcaagagtctccgctgacggtgctttccagaacgacgctggctgagatcctgaagttcgtcaatgaagtcccgtttgcggcgatccgctttattctcgattccgcgaagctaaattgtgcgttatcgcaggaaggtttgagcggtaagtgggggctgcatattggcgcgacgctggaaaaacagtgcgagcgcggtttgctggcgaaagatctctcttcatccattgtgattcgtaccagcgcggcatccgatgcgcgtatgggcggcgctacgcttccggctatgagtaactccggctcgggtaaccaggggatcaccgcaacaatgcctgtggtggtggtagcagaacacttcggagcggatgatgaacggctggcgcgtgcgctgatgctttctcatttgagcgcaatttacatccataaccagttaccgcgtttgtctgcgctgtgtgccgcaacgaccgcagcaatgggggccgccgccgggatggcatggctggtggatgggcgttatgaaaccatctcgatggcgatcagcagtatgatcggcgatgtcagcggcatgatttgcgatggtgcgtcgaacagctgcgcgatgaaggtttcgaccagtgcttcggctgcgtggaaagcggtgttaatggcgctggatgataccgccgtgaccggcaatgaagggatcgtggcgcatgatgttgagcagtcgattgccaacctgtgtgcgttagcaagccattcgatgcagcaaacggatcggcagattatcgagattatggcgagcaaggccagataaacgccaggttttgggtatcgtgccggatgcgatgctggcgcaccttatccggcctacggggtgctcaacttgttgatgttgttgtgttttgtacctgatgccggatgcgatgctggcgcatcttatccggcctacgggttgtttaattcgttaatgttgttggattttgtaggccggataaggcgttttcgccgcatccggcaacctgtctttacgcggtagcttcatcctcggctaaacgcgtttcagcatccgcgacgatggcttccagctcgctcaacatctcttcatagccaaaatttttggcggtgcgagcaggttctttcgccaccacgggcttcactggctggcgctttttggccgattttttactcatcatcatctccctgtaaaaacaactagacaggcaaatctatcagcaaagcgcgcagtggggaatcggcaaccagcgtaatgttagcctcgtcacgaataaacgccccatcaccgcaggtcagcgccgctttctcttcatgatgcgtaagcgcatgaaatttcccgtgaatcgattgcaaatacgcgcgtggcccatgcaactggaaattcgcactttcgcctttgtcgagcacgatatggtgcagccacacttgctggcgtaattgcaggcttcccatcgtaccctctggcgaggcgattaattgctgcttgcccatattaagcgccagtttttgaatcagcggattctctcgctgcgggcaggcgtccagccaaagctgcattcgtgttaacggtttgtctttgctgagattgtgttcgctgtagctgacacccggctgggtagagagcagcaacgcctcaccggcgctggcctgaacatgattgccttcgctgtcgcgatactctgcttctccatccagaatcacatttaaaatatcgactttgggataggttcgcggctgaaaggcggcacctggggccagcacttcctggttaagcacacgcagggaggcatagcctaacaatttcgggtcgaagtagtgtccaaaggaaaaagtataccgggcctgcaaccatccgtagtctgcttgtccacactgcctggcagttcgggtagtaatcataattcttgacctctctttacttccttttatggtaaggggctggacgctacattgttagccagatattctgcccggtatgttcaaatttcctgaatgagaacgaaatggccaaagaaagggcattaacgctggaagcactacgggttatggatgcgatcgatcgccggggcagttttgcggcggcggcggatgagctgggacgcgtgccttccgcacttagctacaccatgcaaaaactggaagaagagctggatgtggtgctgtttgaccgctcgggccatcgcaccaaattcaccaatgtcgggaggatgttgctggagcgagggcgcgttttgctggaagccgcagataaactgactaccgatgcggaagccctcgcgcgcggttgggaaacgcatctcaccattgtgaccgaagcgctggtaccgacacctgcctttttcccgttaatcgacaaactggcggcaaaagccaatacccaactggcaatcatcaccgaagtgctggcgggggcgtgggaacgactggagcaggggcgggcggatattgttatcgcgccggatatgcattttcgttcctcgtcggagatcaactcgcgcaagctctatacgttaatgaacgtctacgttgccgcgcctgatcacccgattcatcaggagccggaaccgttatctgaagtgacgcgcgtgaaatatcgtggaattgcggtagcggataccgctcgtgagcgcccggtgttgaccgtacagctgctggacaaacagccgcgcttaacggtgagcacgattgaagataaacgtcaggcattactggcggggcttggcgtggcgacgatgccgtatccgatggtcgaaaaagatattg

SEQ ID NO: 278 - DNA, 13948 bp, Escherichia coli
  source 1..13948: mol_type = genomic DNA
tgaaaaccctagcccctgggcatatcatccctttatagagaaaacgaaacagtgtttcactatcgttttctattttcacgcttcactgattatcggaggttgatgtggacgtaagacagagcatccacagtgcgcacgcaaaaacgctggatacccaagggctgcgcaatgaatttttggttgaagaggtatttgtcgccgatgagtacaccatggtttacagccacattgaccgaattattgttggcggcattatgccgataactaaaacggtttccgttggcggggaagttggtaaacaactcggcgtaagctatttccttgaacgtcgcgagttaggtgttatcaatattggcggtgccggtacgattactgtcgatggccaatgctatgaaatcggtcaccgcgacgccctgtatgtgggtaaaggtgcaaaagaagttgtctttgccagtattgataccgccactccggcaaagttttattacaattgcgcacccgcgcatacgacgtatcccaccaaaaaagtcaccccggacgaagtatctccagtcacgttaggcgataacctcaccagtaaccgtcgcactattaacaaatattttgtcccggatgtgctggaaacctgccaattgagtatggggctgacggagctggctccgggtaacttgtggaacaccatgccgtgtcacacccacgagcgccggatggaagtttatttctatttcaatatggatgatgacgcctgcgttttccacatgatggggcagccgcaagaaacgcgtcacattgtgatgcataacgagcaggcggtgatctccccgagctggtcgattcattccggcgtcggaaccaaagcttatacctttatctggggcatggtcggtgaaaaccaggtctttgatgatatggaccatgtggccgttaaagatttgcgctagttgtcggcataaacgaataaggtattgttatgattttaagtgcattttctctcgaaggtaaagttgcggtcgtcactggttgtgatactggactgggccaggggatggcgttggggctggcgcaagcgggctgtgacattgttggcattaacatcgttgaaccgactgaaaccatcaagcaggtcacagcgctggggcgtcgttttttaagcctgaccgccgatctgcgaaagattgatggtattccagcactgctggatcgcgcggtagcggagtttggtcatattgatatcctggtgaataacgccggattgattcgccgcgaagacgctctcgagttcagcgaaaaggactgggacgatgtcatgaacctgaatatcaagagcgtattcttcatgtctcaggcagcggcgaaacactttatcgcgcaaggcaatggcggcaagattatcaatatcgcgtcaatgctctccttccagggcgggatccgtgtgccttcttataccgcatcaaaaagcggtgtgatgggcgtgacgcgattgatggcgaacgaatgggctaaacacaacattaatgttaatgcgatagctccgggttacatggcgaccaacaatactcaacaactgcgggcagatgaacaacgtagcgcggaaattctcgaccgcattccagctggccgttggggactgccgagtgacctgatggggccggtagtgttccttgcctccagcgcttcagattatgtgaatggttataccattgccgtggatggcggttggctggcgcgttaattcattcttcttacttttatgaccctgccgcatggcagggttttttatacctgtagatcatcataatccatatcatggttatgaaataatccatatcaattatcaattaatgaactttatgaattttatcttctttaaaattagttggttaataataatctcaataattcaacttaattttaaaattggaatatccatcacataacggcatgtcgcagcaatttaatccatatttatgctgtttccgacctgacacctgtgtgaattgttcacgtattttttcactatgtcttactctctgctggcaggaaaaaatggttactatcaatacggaatctgctttaacgccacgttctttgcgtgatacgcggcgtatgaatatgtttgtttcggtagctgctgcggtcgcaggattgttatttggtcttgatatcggcgtaatcgccggagcgttgccgttcattaccgatcactttgtgctgaccagtcgtttgcaggaatgggtggttagtagcatgatgctcggcgcagcaatcggtgcgctgtttaatggttggctgtcgttccgcctggggcgtaaatacagcctgatggcgggggccatcctgtttgtactcggttctatagggtccgcttttgcgaccagcgtagagatgttaatcgccgctcgtgtggtgctgggcattgctgtcgggatcgcgtcttacaccgctcctctgtatctttctgaaatggcaagtgaaaacgttcgcggtaagatgatcagtatgtaccagttgatggtcacactcggcatcgtgctggcgtttttatccgatacagcgttcagttatagcggtaactggcgcgcaatgttgggggttcttgctttaccagcggtcctgctgattattcgggtggtcttcctgccaaatagcccgcgctggctggcggaaaaggggcgtcatattgaggcggaagaagtgttgcgtatgctgcgcgatacgtcggaaaaagcgcgagaagaactcaacgaaattcgtgaaagcctgaagttaaaacaaggcggttgggcactgtttaagatcaaccgtaacgtccgtcgtgctgtgtttctcggtatgttgttgcaggcgatgcagcagtttaccggtatgaacatcatcatgtactatgcgccgcgtatcttcaaaatggcgggctttacgaccacagaacaacagatgattgcgactctggtcgtgggactgacctttatgttcgcgaccttcattgcggtctttacggtagataaagcaggtcgtaaaccggctctgaaaattggtttcagcgtgatggcgttaggcactctggtgctgggctattgcctgatgcagtttgataacggtacggcttccagtggcttgtcctggctctctgttggcatgacgatgatgtgtattgccggttatgcgatgagcgccgcgccagtggtgtggatcctgtgctctgaaattcagccgctgaaatgccgcgatttcggtattacctgttcgacgacgacaaactgggtgtcgaatatgattatcggcgcgaccttcctgacactgcttgatagcattggcgctgccggtacgttctggctctacactgcgctgaacattgcgtttgtgggcatcactttctggctcattccggaaaccaaaaatgtcacgctggaacatatcgaacgcaaactgatggcaggcgagaagttgagaaatatcggcgtctgatttcatgggccggatgtgctgtacatccggcccttttttcgttaatagagatcgggcacctggccgttgaggcgtttgtctcgttccttattcagccttgttgcggtaacacacatcaggagagaggaatgaaaacaattggtttgctgggaggaatgagctgggaatccaccattccttactatcgtctgataaatgaaggcattaaacagcggcttggtgggcttcactctgcgcaagtgctgctacatagcgtcgattttcatgaaatagaagagtgccagcgtcgcggggaatgggataaaaccggggacattctggctgaggcggcgcttggcttacagcgggcgggcgcagaaggtattgtgctatgtaccaatacgatgcataaagtggcggatgccattgagtcacgttgcactctgcctttcttacacattgcggatgccaccggacgtgcaattaccggggccggaatgactcgtgtggcgctgctgggtacgcgttacaccatggaacaggatttttatcgcgggcggctgacggaacaattttccatcaattgtcttattcctgaagcggatgaacgggcgaaaattaatcagattatttttgaagaactgtgtctggggcaatttaccgaagcgtcacgcgcttattatgcgcaagtgattgctcgccttgcagaacagggcgcacagggcgtcatttttggctgcacagaaattggtttactggtgccagaagagcgcagtgttttgcctgtgtttgatactgcggcgatccatgccgaggatgctgtcgcttttatgctgtcgtagctgacgacaaaatagcgtcaagagaagtgaccagtttcggtaaccccgcttgtaaatgctcactaaacgcctgcaccagcgctgatgacgggcggtgcagggggcggatcaggctgacggtgaacggaaccgcaatactgaaccgccgcaccactaaaccgcttgccgcataatccagtgcggtgagcgggttaaccaccgaaacacctacccccgcccgtaccattgcgcagactgacgcggcgctgtgggtttctacgatcatgcgtcgtttaacctgatgttcagtaaatagctgatccagcaactggcgatagctgtcagtacgggaaaggctgatgtagttctcaccctgaaaatcatccggcgttaataccttttttaccgccagcggatgacccggaggtaacacacacacttcatctaaagagagtaattcggtacgttctgttcccgcaggcgtatggagtgtctcagtgagtcctaaatcatgacgctgggccgagagccactcttcaagtagcggtgattcttggggcacgatatttaagctgacatcgggataacgtgccagaaagggttgcaggagctgcggtaaaaaagattgcgaaaagaccggcaggcaggcaatagacagttctccctggcgaaactcgcgcagactttctgcggcgctgacaatgcgatccagtccgtaccaggatcgttgcacttcttcaaacagacgcagtccttgcacggtaggatgtaatcgtccacgtacgcgctcaaacaattttagcccgatcaccttctcaaagcgcgccagttcgcggctgacggttggctgtgaggtgtgtagcaggtgtgctgcctcagtcaggcttccggcggtcattaccgcatgaaaaatttcaatatgacgtaagttaacggcggccattagcgctctctcgcaatccggtaatccatatcatttttgcatagactcgacataaatcgatattttttattctttttatgatgtggcgtaatcataaaaaagcacttatctggagtttgttatgccacattcactgttcagcaccgataccgatctcaccgccgaaaatctgctgcgtttgcccgctgaatttggctgcccggtgtgggtctacgatgcgcaaattattcgtcggcagattgcagcgctgaaacagtttgatgtggtgcgctttgcacagaaagcctgttccaatattcatattttgcgcttaatgcgtgagcagggcgtgaaagtggattccgtctcgttaggcgaaatagagcgtgcgttggcggcgggttacaatccgcaaacgcaccccgatgatattgtttttacggcagatgttatcgatcaggcgacgcttgaacgcgtcagtgaattgcaaattccggtgaatgcgggttctgttgatatgctcgaccaactgggccaggtttcgccagggcatcgggtatggctgcgcgttaacccggggtttggtcacggacatagccaaaaaaccaataccggtggcgaaaacagcaagcacggtatctggtacaccgatctgcccgccgcactggacgtgatacaacgtcatcatttgcagctggtcggcattcacatgcacattggttctggcgttgattatgcccatctggaacaggtgtgtggtgctatggtacgtcaggtcatcgaattcggtcaggatttacaggctatttctgcgggcggtgggctttctattccttatcaacagggtgaagaggcggttgataccgaacattattatggtctgtggaatgccgcgcgtgagcaaatcgctcgccatttgggccaccctgtgaaactggaaattgaaccgggtcgctttctggtagcgcagtctggcgtgttaattactcaggtgcggagcgtcaaacaaatgggtagccgccactttgtgctggttgatgtcgggttcaacgatctgatgcgcccggcaatgtacggtagttaccaccatatcagtgccctggcagctgatggtcgttctctggaacacgcgccaacggtggaaaccgtcgtcgccgggccattatgtgaatcgggcgatgtctttacccagcaggaagggggaaatgttgaaacccgcgccttgccggaagtgaaggcgggtgattatctggtactgcatgatacaggggcatatggcgcatcaatgtcatccaactacaatagccgtccgctgttaccagaagttctgtttgataatggtcaggcgcggttgattcgccgtcgccagaccatcgaagaattactggcgctggaattgctttaactgcggttagtcgctggttgcatgatgacttgcctccagcgacggagttgacactgaatgacgacgtaccagcgtcggactaaagacattagtgatttccgggagagggcgattatccgccagcgccaaagccagttcggcagcctgggtcgccatcgtcacgattgggtaacgcacggtggtcaggcgcggacgcacatagcgtgacaccagcacatcatcaaagccaattaacgaaatctcacccggtacatcaataccattatcattgagaacgcccatcgcacccgccgccattgaatcgttataacaggctaccgcagtgaaatttcttcctcgtcccaaaagctcggtcattgcctgttcgccgccgctttcgtctggttcgccaaatgtcaccagccggtcattggccgcaataccactttcagcaagggcatcgtaatacccttgcagacgatcttcggcgtcagaaatagagtggttagagcacagataaccaatgcgggtatgaccttgctgaattaaatgacgcgttgccagccaggcaccgtaacgatcgtcaagagcaatacaacggttttcaaagccaggcaggatacggttgatcagcaccataccgggcatttgtttcattaatgaggctaaatcggcatccgggatcattttggcatggacgaccaacgcagcacagcgatggcggatcagttgctcaatagcctgacgctctttttgttcgttgtggtaaccgttgccaatcaataagaaattaccggtgtgataagccacctgttcgaccgctttcaccattgcaccgaaaaacggatcggaaacatcaccaacgatcagaccgaccgtttcagtggtctgctgcgccagcgcacgggcgttggcgttcgggtgatagctaagagactccattgcactatgcacagccagccgggaagcttcactggctttaggtgaattattaatgacgcgggaaacggtggcgactgaaacgcctgccagtcgggctacatcctttatggtcgccatgaaaataccttagtgggtaaacgcttacattctttcagtgttacggaaaacgcccgttggttcaaggggtggcgtgttttcatcgtgggaatgtgagccaaacgcaaataagtaagacaaaaaaagagattgcaaacctttggttacactttgcgaaacgctgttgcgattgaccgctggtggcgtttggcttcaggttgctaaagtggtgatcccagaggtattgataggtgaagtcaacttcgggttgagcacatgaattacaccagcctgcgcagatgcgcaggttttttttgccggtcatcaatctgtaacagtaaccgacaatttacacacctcgttgcatttcccttcattcctttgcgttttctcgctggcgaagagtcgtcgtgcagaccacaatcaagatcccagaggtattgattggtgagattattcggtacgctcttcgtaccctgtctcttgcaccaacctgcgcggatgcgcaggttttttttcgcacctaatttactgtcgctcgcgttctttatctcgtgtaatctccctccattcgcttttactgaatcagagcaaagggagttggaatgctttttagcttttttcgaaatttgtgccgtgttttgtatcgcgttcgcgttacgggtgacacccaggcactgaagggcgagcgcgttctaattacgcctaatcacgtctcttttattgatggcattttgcttggactgtttttacctgtgcgtccagtgtttgccgtttacacctcaataagccaacagtggtatatgcgttggctgaaatcatttatcgactttgttcctctcgacccgacgcaacctatggctattaaacatctggtacgtctggtggaacagggccgaccagtggtgattttccctgaaggacgcatcaccactacaggctcgctgatgaaaatctacgatggcgcgggttttgtcgcggcgaagtctggtgcaacggttattcctgtgcgtattgaaggggcggaacttacgcacttcagccgcctgaaaggtctggttaaacgtcgcttgttcccgcaaattactctgcatattttgccaccaacgcaggtggcgatgccggatgcgccgcgtgcccgtgaccgtcgcaaaatcgctggcgaaatgctgcatcaaataatgatggaagcgcgaatggcggtgcgcccgcgtgaaacgctgtacgaatctttactgagtgcaatgtaccgcttcggagccgggaagaaatgtgtcgaagacgtcaactttaccccagactcctatcgcaaattgcttacgaaaacgctgtttgttggacgcatccttgaaaaatacagtgttgaaggcgaacgcatcggcttaatgctgcccaatgcaggcatcagtgcggcagtgatttttggggccatcgcccgtcgccgcatgcccgcaatgatgaactacactgccggggtaaaagggctgaccagtgctattacggcggctgaaatcaaaaccatcttcacttcccgccagtttctcgataaaggcaaactctggcatctgccggagcaacttactcaggtgcgctgggtctatctggaagatttaaaagcagatgtcaccactgccgacaaagtatggatcttcgctcatttgctgatgccgcgtctggcacaggttaaacagcagccggaagaagaggcgctgatcctctttacctccggttctgaaggccatccgaaaggcgtcgtccatagccataaaagcattctggcgaatgtcgagcagattaaaacgattgccaacttcaccaccaacgatcgctttatgtcggcgttaccgctgtttcactcctttgggctgacggtaggcctgtttacgccactgcttacaggtgcagaagtgttcctttatccaagcccgctgcattaccgcattgtgccggagttggtgtatgaccgcagttgcaccgtgttgttcggtacctcgactttcctcggtcactacgcgcgtttcgccaacccgtatgacttctatcgtctacgctatgtggtggcaggcgcagaaaaactacaagaaagtaccaaacagctttggcaggataaatttggcctgcgcatccttgaaggctatggtgtaaccgagtgcgcgcctgtcgtttctatcaacgtaccgatggcggcgaaacccggtacggtagggcgtattctaccaggaatggatgcgcgcctgttgtcggttcctggtatcgaagagggcggacgcctgcaactgaaagggccgaacataatgaacggctatctgcgggtggagaagccaggtgtactggaagtgcccaccgccgagaatgttcgcggcgaaatggagcgcggctggtatgacactggcgatattgtgcgttttgacgagcagggctttgtgcagattcagggccgcgcaaaacgctttgccaaaattgcaggcgaaatggtgtcgctggaaatggtggaacaactggcacttggtgtttcgccagataaagtccatgccactgcgattaagagcgatgccagcaaaggcgaggcactggtgcttttcaccacagataacgaactgacgcgcgataagttgcaacagtatgcccgcgagcacggcgtgccggagcttgctgtaccgcgcgatattcgctatctgaaacagatgccattacttggcagcggcaaacctgactttgtcacgttgaaaagctgggtagacgaagcggaacaacacgatgagtgagtcagtgcacactaacacttcgttgtggtcgaaggggatgaaagcggttatcgtggcgcagtttctctctgcgtttggcgataatgccctactgtttgccactctggcgttactgaaagcgcagttctatccggagtggagccagcccatcctgcaaatggtgtttgtaggtgcttacattctttttgcgccgtttgtcgggcaggtggcggatagcttcgccaaaggccgggtgatgatgtttgccaacggcctgaagctgctgggcgcagccagtatctgctttggtatcaatccgtttctcggctatacgctggtgggtgttggtgctgcagcctattcaccggcgaaatacggtattctcggcgaattaaccacgggtagtaagttagtgaaagctaacggtttaatggaagcttctaccatagcggcgattttgctcggttccgtagccggtggtgtgctggctgactggcatgtcctcgtcgccctggccgcatgcgcactggcctacggtggtgcggtcgttgccaatatctacattcccaaactggcggcggcgcgtccggggcagtcctggaatctcatcaacatgacccgcagtttcctgaatgcctgcacctcgctatggcgcaatggtgaaacgcgtttttcgctggtgggcaccagtttattctggggagcgggtgtcacgctgcgtttcctgttggtgctgtgggtaccggtggcgctgggcattaccgataacgctacgcccacctatctcaacgcgatggtagcgattggtatcgtggttggcgcaggtgcggcagcgaagttagttacgctggaaaccgtgtcacgctgtatgccagccgggattttgattggcgtggtggtactgattttttccctgcaacacgagctgctgccagcctatgccttgttgatgctgattggcgtgatggggggcttttttgtcgttccgctcaatgcgttgctacaggagcggggtaaaaaaagcgtcggggcggggaatgcgattgcagtacaaaaccttggcgaaaacagcgccatgttgttgatgctgggcatttactcgctggcggtaatgataggcatcccggtcgtgcccattggcattggcttcggtgcgctgtttgcgctggcaataacggcgctgtggatctggcagcgccgtcattaatatttaacgccggttttaaccggcgttaatcttatggtgccggataagtataaacctgatgcaccgcttcaatttcagctaatacgtcttcgcttaactccagatgcaaactttcgatgttagttttcagctgatccatcgtggttgcgcccagcagagtgctggcaacaaacggttgacggcgtacaaacgcgagcgccatctgagcagggtccaggccatgacgtctggcgatatcaacatacgccgcgacggctttttgcgtttgctcaccgctatagcgggtgaaccgactaaagagcgtattacgtgcgccagcgggttttgcaccattgagatatttcccggtcagcgtgccgaaacccaggcacgaataggccagcagttcgaccccttcatactggctgacttctgccagacctacttcaaaactgcggtttaacagactgtaagggttctgaatggtgacaatacgcggcagatcgtgtttgtccgccagatgcaggtagcgcattacgccaaatgcagtttcgttcgacacgccgatataacgaatttttcccgcgcgttggtactctgccagtgcgtccagcgtatccagcagcgaaaccgcaggcgcagaatccgtccagctataaccgagtttgccgaagcagttggtcgggcgctgcggccagtgcacctgataaagatcgaggtaatcagtctgtaggcgcttgaggctgtcatgcagcgcttcgcggatattcttccgatccagcgcctgatccgggcggatgcccttgtcattattgcgcgacggtccgctcactttggaggcgataattaacttttcgcggctgccatgtttcgccagccagttgccgacgtaggtttcggttaacccttgcgtttcggggcgcggaggtactgggtacatttcggcaacgtcgataaggttaatgccctgagcgacggcatagtcgagttgtgcgtgggcgtcggcttcgctgttctgttcaccaaacgtcatcgtgccaagccccagcgtgctgacttccagcgaactgtggggtatacggtgatattgcatagccgtttcctttttataatcacgacataaggaatataaaaatggcagagggaagggaaaagggaaagagaaaaatcttaaggccagccggatgctgaccttatttgttaacgttcaataatttgcgaaacatcatcacggttaatttgcatcgcgttaccttgctgatcgtgataactcaccagcccggtatcatcatcaatttcaggttttccatcggtcaaaatcatacggccatctttggtcgccatgacgtaatcactggaacacccggaaacagcaaacgccagtccgactgcagaaattattactgcccattttttcatccggttatcctcatttggcctacctatgataatagtctgtttataaaccgacgttatatatcttgaaagcaggaaaatcttaaactgtgagggtaaaaggagtgagtacgccctcccgcaggagagcgtacggagtatcagagcggattctttttgttgcgaatcaagttgaggctttcaaccgcaatagagaagaacatcgcgaagtagatgtaacctttcggtacgtggatgtcgaaactttccagaatcagggtaaagcccaccagaatcaggaaagagagcgccagcatttttaccgaaggatggcgttcgacaaaatcaccaatcgagcgcgcggcgaacatcatcacgcctacggcaatcaccacggctgccatcataataaacaggtgatctgacagacccacagccgtaatcaccgagtcgaggctaaagataatatccagcagcataatctgcacgatagcgccgaggaatgatgaaacgcgtgttttcagcccttcttcttcaccttcaatggattcgtggatttccttgctggctttccagataaggaacaagccacccagaagcagaatcaaatcacgggcagaaatttcctgactgaatattgtaaaaagcggatttgtcaggcgcgtaacccaggcgattgatgccagcagcgccagacgcataaccatggctcccgccaaccccagacggcgcgcatgagcacgttgtgctgtgggaagctttgccaccaccagagaaaggaaaataatattgtcgatcccaagaacgatctccagcagcgtcagcgtaccgagcgcaagccaggcgttaggatcggttatccatgcaaataacatctaaaaagccctgccaaaaaaatgaagcggtaattatatgcccggaaagcggcaggtcaaagcgatggctactggatcagaaaatgacgggccagtagtgcactggtgaaattcttcttcaaataaaagccgcgtggca

SEQ ID NO: 279 - DNA, 13907 bp, Escherichia coli
  source 1..13907: mol_type = genomic DNA
caaaaatggaacacataaaaatataatatgttttatctgcaaccataaggaaatgataatgattttcacgtcaagttgctgcgataatttatcaatagatgagattatcgaacgtgctgaaaaaggcgattgcgaggctcaatatattgttgggttttattataatcgcgatagcgcaattgattctccggacgacgaaaaagccttttactggctgaagctggccgccgagcaaggtcattgtgaagcacaatattccttaggacaaaagtatactgaggataaaagccgtcataaagataatgagcatgcaatcttttggctgaaaaaagctgccctacaaggccatactttcgcttccaacgcccttggctggatactggatcgtggagaagaccccaattataaagaagcggttgtctggtatcagatagccgcggagagcggaatgtcttatgcgcaaaataatcttgggtggatgtacagaaatggcaacggagtcgcaaaagactatgcgctggcatttttctggtacaaacaagctgcattacaaggccatagtgacgcgcaaaacaatctggccgatctttatgaagacggaaaaggcgttgctcaaaacgagacactcgccgcattctggtatttgaaaagcgcacagcagggtaatcggcatgctcagtttcaaattgcatgggattataacgctggcgaaggggtggaccaggactataagcaagcgatgtactggtatctgaaggctgccgctcaggggagcgtcggcgcttacgtcaacatcggttatatgtataaacacggacaaggcgttgagaaagattatcaggctgcctttgaatggtttacgaaagccgctgaatgcaatgacgccactgcctggtataacctggccattatgtatcactacggagaaggaagacctgtcgatctccgacaggctctcgacctgtatcgtaaagttcagtcatccggaaccagagatgtcagtcaagaaattcgtgagattgaagatttactgtagagataaaaacaagggccggggaatttcattcggcccatattctctttattgctgtgcgaaatcagactattacggctcaaacgggcgtctctggaactggtcatgaccacatttcgggcatagcgtcagcacttccggtgtgtagatcgggagatggaagtgacatttctcgcagaccagatttcccagcccgaccacttctccgctgtgataaaccccatgatgattgaggtcctggaaaacttcgcgccattcaagctgcgttttatcggtgatgtctgccagctcctgccacaagctttctttaatcacccgcataaagacgctgtcagattcttctttcaggctctcttcatagctcatggcgaactcttccaggtcacgtctgacagctcgcgtcagctcatcgacctcggttcgcgttaactcccctgtttttattacgcgctcgcgcgcctgttccaccagtgcgtcgatatcacgttcgccattgcgcaggcgttcgctcagtgacgcgaccagttcacggtaatattgagcaaccttgttcatcgtttcatctcccgggtcgttaactgactataataatagacgttctttgttccttgctttgctaatacgcccacaaactctgtaaattaatgtatgaataatccgggcatcatttcaacgtcgagtgcgcgaaaggctgttttgacgcggacgtttgggctatgctatgcggatctgaaaaaccacctcaacgctacatttgtagccgtattgaaaacaggaccactggctgccatgcaagagcaataccgcccggaagagatagaatccaaagtacagcttcattgggatgagaagcgcacatttgaagtaaccgaagacgagagcaaagagaagtattactgcctgtctatgcttccctatccttctggtcgactacacatgggccacgtacgtaactacaccatcggtgacgtgatcgcccgctaccagcgtatgctgggcaaaaacgtcctgcagccgatcggctgggacgcgtttggtctgcctgcggaaggcgcggcggtgaaaaacaacaccgctccggcaccgtggacgtacgacaacatcgcgtatatgaaaaaccagctcaaaatgctgggctttggttatgactggagccgcgagctggcaacctgtacgccggaatactaccgttgggaacagaaattcttcaccgagctgtataaaaaaggcctggtatataagaagacttctgcggtcaactggtgcccgaacgaccagaccgtactggcgaacgaacaagttatcgacggctgctgctggcgctgcgataccaaagttgaacgtaaagagatcccgcagtggtttatcaaaatcactgcttacgctgacgagctgctcaacgatctggataaactggatcactggccagacaccgttaaaaccatgcagcgtaactggatcggtcgttccgaaggcgtggagatcaccttcaacgttaacgactatgacaacacgctgaccgtttacactacccgcccggacacctttatgggttgtacctacctggcggtagctgcgggtcatccgctggcgcagaaagcggcggaaaataatcctgaactggcggcctttattgacgaatgccgtaacaccaaagttgccgaagctgaaatggcgacgatggagaaaaaaggcgtcgatactggctttaaagctgttcacccattaacgggcgaagaaattcccgtttgggcagcaaacttcgtattgatggagtacggcacgggcgcagttatggcggttccgggtcacgaccagcgcgactacgagtttgcctctaaatacggcctgaacatcaaaccagttatcctggctgctgacggctctgagccagatctttctcagcaagccctgactgaaaaaggcgtgctgttcaactctggcgaattcaacggtcttgaccatgaagcggccttcaacgccatcgccgataaactgactgcgatgggcgttggcgagcgtaaagtgaactaccgcctgcgcgactggggtgtttctcgtcagcgttactggggcgcgccgattccgatggtgacgctggaagacggtaccgtaatgccgaccccggacgaccagctgccggtgatcctgccggaagatgtggtgatggacggcattaccagcccgattaaagcagatccggagtgggcaaaaactaccgttaacggtatgccagcgctgcgtgaaaccgacactttcgacacctttatggagtcctcctggtactatgcgcgctacacttgcccagagtacaaagaaggtatgctggattccgaagcggctaactactggctgccggtggatatctacattggtggtatcgaacacgccattatgcacctgctctacttccgcttcttccacaaactgatgcgtgatgcaggcatggtgaactctgacgaaccagcgaaacagttgctgtgtcagggtatggtgctggcagatgccttctactatgttggcgaaaacggcgaacgtaactgggtttccccggttgatgctatcgttgaacgtgacgagaaaggccgtatcgtgaaagcgaaagatgcggcaggccatgaactggtttataccggcatgagcaaaatgtccaagtcgaagaacaacggtatcgacccgcaggtgatggttgaacgttacggcgcggacaccgttcgtctgtttatgatgtttgcttctccggctgatatgactctcgaatggcaggaatccggtgtggaaggggctaaccgcttcctgaaacgtgtctggaaactggtttacgagcacacagcaaaaggtgatgttgcggcactgaacgttgatgcgctgactgaagatcagaaagcgctgcgtcgcgatgtgcataaaacgatcgctaaagtgaccgatgatatcggccgtcgtcagaccttcaacaccgcaattgcggcgattatggagctgatgaacaaactggcgaaagcaccaaccgatggcgagcaggatcgcgctctgatgcaggaagcgctgctggccgttgtccgtatgcttaacccgttcaccccgcacatctgcttcacgctgtggcaggaactgaaaggcgaaggcgatatcgacaacgcgccgtggccggttgctgacgaaaaagcgatggtggaagactccacgctggtcgtggtgcaggttaacggtaaagtccgtgccaaaatcaccgttccggtggacgcaacggaagaacaggttcgcgaacgtgctggccaggaacatctggtagcaaaatatcttgatggcgttaccgtgcgtaaagtgatttacgtaccaggtaaactcctcaatctggtcgttggctaagcgcgggaggaagcgtgcgatatctggcaacattgttgttatctctggcggtgttaatcaccgccgggtgtggctggcatctgcgtgataccacgcaggttccttccactatgaaggtcatgatcctggactcaggcgatccgaacgggccattaagccgtgcggtgcgtaaccagttacgtctgaatggtgtcgagttgcttgataaagaaaccacgcgtaaggacgttccatccctgcgtttgggtaaagtgagcatcgcgaaagataccgcatcggtattccgtaacggtcaaacagcagagtatcagatgatcatgacggtgaatgcgaccgtgttgatccccggccgtgatatctacccgattagcgccaaagtcttccgttcgttctttgataacccgcaaatggcgttagcgaaagataacgaacaagacatgatcgtaaaagagatgtacgaccgtgctgccgaacagctgattcgtaagctgccaagcatccgtgctgcggatattcgttccgacgaagaacagacgtcgaccacaacggatactccggcaacgcctgcacgcgtctccaccacgctgggtaactgatgattcggttgtacccggaacaactccgcgcgcagctcaatgaagggctgcgcgcggcgtatcttttacttggtaacgatcctctgttattgcaggaaagccaggacgctgttcgtcaggtagctgcggcacaaggattcgaagaacaccacactttttccattgatcccaacactgactggaatgcgatcttttcgttatgccaggctatgagtctgtttgccagtcgacaaacgctattgctgttgttaccagaaaacggaccgaatgcggcgatcaatgaacaacttctcacactcaccggacttctgcatgacgacctgctgttgatcgtccgcggtaataaattaagcaaagcgcaagaaaatgccgcctggtttactgcgcttgcgaatcgcagcgtgcaggtgacctgtcagacaccggagcaggctcagcttccccgctgggttgctgcgcgcgcaaaacagctcaacttagaactggatgacgctgcaaatcaggtgctctgctactgttatgaaggtaacctgctggcgctggctcaggcactggagcgtttatcgctgctctggccagacggcaaattgacattaccgcgcgttgaacaggcggtgaatgatgccgcgcatttcaccccttttcattgggttgatgctttgttgatgggaaaaagtaagcgcgcgttgcatattcttcagcaactgcgtctggaaggcagcgagccggttattttgttgcgcacattacaacgtgaactgttgttactggttaacctgaaacgccagtctgcccatacgccactgcgtgcgttgtttgataagcatcgggtatggcagaaccgccggggcatgatgggcgaggcgttaaatcgcttaagtcagccgcagttacgtcaggccgtgcaactcctgacacgaacggaactcaccctcaaacaagattacggtcagtcagtgtgggcagagctggaagggttatctcttctgttgtgccataaacccctggcggacgtatttatcgacggttgatatgaaatctttacaggctctgtttggcggcacctttgatccggtgcactatggtcatcttaaacccgtggaaacgctggcgaatttgattggtctgacgcgggtcacaatcatccctaataatgttcctccgcatcgtccccagccggaagcgaacagcgtgcagcgtaaacacatgcttgaactggcgattgccgacaagccattatttactcttgatgaacgcgagctaaagcgcaatgccccctcttacactgcgcaaacactgaaagagtggcggcaggaacaagggccggacgtgccgctggcgtttattattggtcaggattcattgctgacctttccgacctggtacgaatacgaaacgatactcgacaatgcacatttgatcgtctgtcggcgtccaggttacccacttgaaatggcgcaaccgcaataccagcaatggctggaagatcatttgacacataacccggaagatcttcaccttcagcctgccggtaaaatttatctggctgaaacgccgtggtttaacatctcggcgaccatcatccgcgaacgtttgcaaaacggtgaatcgtgtgaggatttattgccggaaccggtactgacttacattaaccaacaaggcttgtatcgctgatacctgtcgttacggagggcatgatgcgactgtggttaattcgtcatggcgaaacgcaagcgaatgtcgatggtctgtacagcggtcatgcgcccacacccctgaccgcacgcggtattgagcaagcgcaaaatctgcatacgctgctacatggtgtttcctttgatctggttttatgcagtgaactggaacgggcacagcataccgcgcgactggttctcagtgaccgccagctccccgtgcaaatcatccctgaactcaacgaaatgttttttggcgactgggagatgcgacatcatcgcgacctcatgcaagaagatgccgaaaactatagcgcgtggtgcaatgactggcagcatgcaatccccacgaacggtgaaggatttcaggcattttcgcaacgtgtggaacgctttatcgcaaggcttagtgaatttcagcactatcagaatattttagtcgtcagccatcagggtgtactgagtctgttaatcgcccgtttaattggcatgcctgccgaggctatgtggcattttcgcgttgaccaggggtgttggagcaccattgatatcaaccaaaaattcgcgacgctacgcgtcctcaatagccgtgccatcggggtcgagaatgcatgacttttctgtttttttacgggtaagccgcaacgaccattgacagacccgggcaggctgatattctccgcagccagacttttttcgccagacacgactttgtagaaattgttttacaaaaatggcgatgcaatctgcggcgcggggtgggatgatagcccactttcgaaagccgattcggcgacaattgtcccgaaatcgcctctggttcaggtatactgacagaccatttttatctatttgattcacccagggggaaaacttgcagggtaaagcactccaggattttgttatcgacaaaattgatgacctcaaaggtcaggacatcatcgccttagacgttcaaggcaaatccagcatcaccgactgcatgatcatctgtacgggtacgtccagccgtcatgttatgtccattgctgaccacgttgtgcaggagtctcgcgcagcgggcctgttaccgctcggcgtagaaggtgaaaacagcgccgactggattgtcgtggatttgggcgatgtgattgtccatgtcatgcaggaagagagccgtcgcctgtatgaactggaaaaactctggagttaatgcgtgaagctgcaacttgtcgccgtgggaacgaaaatgccggactgggtacaaaccggttttaccgagtacctgcgtcgttttccgaaagatatgcccttcgagctgattgaaattccggccggaaaacgcggcaagaatgcggacatcaagcgcatactcgacaaagagggtgagcagatgttggcggccgcaggcaaaaaccgcattgtcaccctcgatattccaggcaagccctgggatacaccgcagttagccgctgagctggaacgctggaagctggatggtcgcgacgtcagtctactgattggcgggcctgaagggttgtcgcctgcctgtaaagcggcggcggagcagagctggtcgctgtcggcgcttaccctcccccatccgctggttcgcgtgctggtcgcagagagtctgtaccgggcgtggagcatcaccaccaaccatccttatcaccgtgagtgataagggagctttgagtagaaaacgcagcggatgaaactacagaactcttttcgcgactatacggcagagtccgcgctgtttgtgcgccgggcgctggtcgcatttttggggattttgctgctgaccggcgtgcttatcgccaacctgtataatctgcaaattgttcgctttaccgactaccagactcgctctaatgaaaaccgcattaagctggtgcctatcgcgcccagccgcggcattatctacgaccgtaatggtatccctctggccctcaaccgcactatctaccagatagaaatgatgccagagaaagtcgataacgtgcagcaaacgctggacgctttgcgcagcgtggttgatctgaccgatgacgatattgctgcattccgaaaagagcgcgcacgttcacaccgtttcacctctattccggtgaaaactaacctgaccgaagtacaagtagctcgctttgccgtcaatcagtaccgttttccgggtgtcgaagttaaaggctataaacgtcgttactatccttacggttcggcgttgacccacgtcatcggctatgtgtcgaaaatcaacgataaagacgtcgaacgcctgaataatgacggcaaactggccaactatgcggcaacgcatgatatcggtaagctgggcattgagcgttactatgaagacgtgctgcacggtcagaccggttatgaagaggttgaagttaacaaccgtgggcgtgttatccgccagttaaaagaagtaccaccgcaagccggacacgatatttacctgacgctggatctcaaactccagcaatatattgaaacgctgctggcgggtagccgcgcagctgtggttgtcaccgatccgcgtacaggtggggtgctggcgctggtttccacgcctagttatgacccaaacctgtttgttgacggtatctccagcaaagattattccgccttgttgaacgacccgaatacaccgctggtgaaccgcgccacacagggggtttatcctcccgcgtctacagttaaaccctatgtggcggtttcggcattgagcgccggggtgatcacgcgcaatacgacgctgtttgacccaggctggtggcaactgccaggttcggaaaaacgttatcgtgactggaaaaaatggggccacgggcgtctgaatgtcacaagatcgctggaagaatctgcggataccttcttctatcaggtggcctacgatatggggatcgatcgcctctccgaatggatgggtaaattcggttatggtcattacaccggtatcgacctggcggaagaacgttccggcaacatgcctacccgcgaatggaaacagaaacgctttaaaaaaccgtggtatcagggtgacaccattccggttggtatcggtcagggttactggacagcgaccccaatccagatgagtaaggcactgatgatcctgattaatgacggtatcgtgaaggttccgcatttgctgatgagcaccgccgannnnnnnnnnaacaggtgccatgggtacaaccgcatgaaccgcccgtcggcgatattcattccggttactgggagctggcgaaagacggtatgtacggtgttgctaaccgccctaacggtacggcgcataaatactttgccagcgcaccgtacaaaattgcggcgaaatctggtaccgctcaggtcttcggtctgaaagcgaacgaaacctataatgcgcacaaaattgccgagcgtttacgtgaccacaaactgatgaccgcctttgcgccatacaacaatccgcaagtggctgtcgccatgattctggagaacggcggcgcgggtccggcggttggtacgctgatgcgccagatcctcgaccacattatgctgggtgataacaacaccgatctgcctgcggaaaatccagcggttgccgcagcggaggaccattaatcatgacggataatccgaataaaaaaacattctgggataaagtccatctcgatcccacaatgctgctgattttactggcattgctggtttacagcgccctggttatctggagcgccagcggtcaggatattggcatgatggagcgcaaaatcggccaaatcgcgatgggtctggtcatcatggtggtgatggcgcaaattcctccacgcgtttatgaaggctgggccccctatctctatatcatctgtattattttgctggtggcggtagatgctttcggtgccatctctaaaggtgctcaacgctggctggacctcggtattgttcgttttcagccgtcggaaattgccaaaatagccgtaccactgatggttgcgcgctttatcaaccgcgacgtttgcccgccatcgttgaagaacactggcatcgcgctggtgctgatatttatgcccacgctgctggtggctgcacagcctgacctgggaacatcaatcctcgttgcgctttccggtctgtttgtactgttcctctctggccttagctggcgtctgattggcgtcgcagtagtgctggtagcggcgttcattccgattctgtggttcttcctgatgcatgattaccagcgccagcgcgtaatgatgctcctggacccggaatcagacccactaggcgcgggctatcacattattcagtctaaaattgctattggctccggcggattacgcggcaaaggctggctgcacggcactcagtcacagcttgaatttctccccgaacgccataccgactttatcttcgcggtactggcggaagagctgggattagtgggcattctgattctgctcgctctctacattctgctgatcatgcgcgggctgtggatagccgccagagcgcaaaccacctttggtcgcgtcatggctggtggcttaatgctgatattattcgtttatgtcttcgtaaatattggtatggtaagcggtattctgccggttgtaggggttccgctcccactggtcagttatggaggatcggcgctaattgtgctgatggctgggttcgggattgtaatgtcaatccacacccacaggaaaatgttgtcgaaaagcgtgtaagaggtgcgcaatgcgtaagcagtggctcgggatctgcatcgcggcaggaatgctcgcggcatgtacaagcgatgatggtcagcaacagacggtaagtgtaccgcagcctgcggtatgtaacggccccatagttgaaattagcggggcggacccgcgtttcgaaccactgaacgcgacggcaaatcaggattaccagcgcgacggtaaaagctacaaaatcgtgcaggatccgtctcgatttagccaggcgggactggcggcaatctatgatgccgaacctggcagtaacctgacggcctctggcgaagctttcgatccgacacagttgacggcggcccatccaacgcttccgatccccagctacgccagaatcactaacctggctaacgggcgaatgatcgtggtgcgcattaatgatcgcggcccctacggcaacgaccgcgtaatttcgctttctcgcgcagcagctgaccgtcttaacacgtcaaacaacaccaaagttcgtatcgatccgattattgtcgcccaggatggttcgctttctggtcctggtatggcttgtaccacagtcgccaaacagacttacgccctgcctgcacctcccgatttaagcggtggcgcgggggcaagttcagtgtctggcccgcagggtgacattcttccggtcagtaactcgacgctaaaaagcgaagatccgaccggcgcgccggtaaccagcagcggtttcctcggcgcaccaacgaccttagcgcctggtgtactggaaagcagcgaaccgacacctgcaccacagcccgttgttacagctccgtcgacaacgcctgcaacctcgcctgcaatggtgacaccgcaagccgcctcgcaaagcgccagcggcaactttatggtgcaagtcggggccgttagcgatcaggctcgtgcgcaacagtaccaacagcaactgggacagaagttcggcgtccccggtcgcgtaactcaaaatggcgcggtctggcgtatccagcttggcccattcgccagtaaagccgaagccagtaccttgcagcaacgtttgcaaaccgaagcccaattacagtcatttattaccaccgcgcagtagcgtaaagcaggcatctgatgtgtcaatttctgtaaatgacgttaacaaagtcacgcggaaagtcagatgcctgccggtagtgcatttgctatagtagggcactttttttaattccatcacggatgtcgtagttcagaccatgaataccattttttccgctcgtatcatgaagcgcctggcgctcaccacggctctttgcacagcctttatctctgctgcacatgccgatgacctgaatatcaaaactatgatcccgggtgtaccgcagatcgatgcggagtcctacatcctgattgactataactccggcaaagtgctcgccgaacagaacgcagatgtccgccgcgatcctgccagcctgaccaaaatgatgaccagttacgttatcggccaggcaatgaaagccggtaaatttaaagaaactgatttagtcactatcggcaacgacgcatgggccaccggtaacccggtgtttaaaggttcttcgctgatgttcctcaaaccgggcatgcaggttccggtttctcagctgatccgcggtattaacctgcaatcgggtaacgatgcttgtgtcgccatggccgattttgccgctggtagccaggacgcttttgttggcttgatgaatagctatgttaacgccctgggcctgaaaaacacccacttccagacggtacatggtctggatgctgatggtcagtacagctccgcgcgcgatatggcgctgatcggccaggcgttgatccgtgacgtaccgaatgaatactcgatctataaagaaaaagaatttacgtttaacggtattcgccagctgaaccgtaacggcctgttatgggataacagcctgaatgtcgacggcatcaaaaccggacacactgacaaagcaggttacaaccttgttgcttctgcgactgaaggccagatgcgcttgatctctgcggtgatgggcggacgtacttttaaaggccgtgaagccgaaagtaaaaaactgttaacctggggcttccgtttcttcgaaaccgttaacccactgaaagtaggtaaagagctcgcctctgaaccggtttggtttggtgattctgatcgcgcttcgttaggggttgataaagacgtgtacctgaccattccgcgtggtcgcatgaaagatctgaaagccagctatgtgctgaacagcagtgaattgcatgcgccgctgcaaaagaatcaggtcgtcggaactatcaacttccagcttgatggcaaaacgatcgagcaacgcccgctggttgtgttgcaagaaatcccggaaggtaacttcttcggcaaaatcattgattacattaaattaatgttccatcactggtttggttaaaaattgaacacttgaaagtgtaatttccgtccccatatactaagcatcag

SEQ ID NO: 280 - DNA, 13854 bp, Escherichia coli
  source 1..13854: mol_type = genomic DNA
gggatgtgtataccattattcctgaagtcactcttactcaatcttgtctgtgcagagtacaaatattgtccctgcgcgaaggcagttcagggcaaagtcagacgaagcaagaaaagaccctttcattgcctgctaatcaacccattgctttgacgaagttgagtttaaatatttccccggacgatcgggtgaaaatagttgttactgtttctgatggacagtcacttcatttatcacaacaatggccgccctcttcagaaaagtcttaatttgttgaaatatcgagcataagatgaatctggagagaatggtctgctgcgaatcagccaacctgaaagtatggataacacaaccctcaaggatgactaatcattgaggaaatagaataaatgttcagaccttttttaaactctcttatgctcggcagtttgttttttccttttattgccatcgcaggaagcaccgcgcaagggggcgtgatccatttttatggccaaattgtggaaccggcatgtgacgtcagcacccagtcatcacccgtagaaatgaactgcccacagaatggttctgttccgggcaaaacctattccagcaaagcgttaatgagcggcaatgtcaaaaacgcgcaaatagcctcagtaaaagtgcagtatcttgataaacagaaaaagctggctgtaatgaacatcgaatataactaagtttctgaacaactcacgttgctgagtagaaaaatgcgatttaaccaaaaagcctgctgtacacttaagaaacaagaaggtgtaaggaggcgttatgaaaacgcgtattcatgttgtgcagggtgatattaccaaactggccgttgatgtgattgtgaatgcggctaatccttcattaatgggaggtggcggcgtcgatggggccattcatcgcgcagcgggtccggccctactggatgcctgtttaaaagtcaggcaacagcagggcgattgccctacggggcatgccgttattacgcttgcaggcgctcttcccgctaaagccgtagtgcacaccgtcgggccagtctggcgtggtggtgaacaaaacgaagaccagcttttgcaggatgcctatctcaatagcctacgactggtggcggcaaacagctatacgtcagtggcttttcctgcaatcagtactggggtttatggttaccctcgtgcggcagcggctgaaatcgcagtaaaaaccgtttcagaatttattacccgtcacgctttacccgaacaggtatactttgtctgttatgatgaagaaaacgcccacctctacgaaagactccttacccaacaaggagatgaatgatttgccccggctggcgagcgcggtgctgccactgtgttcgcaacatcccggtcagtgtggcctttttcctctggagaaaagtctggatgcgtttgccgcccggtatcgtctggccgaaatggcagagcatacgctcgatgttcagtattacatctggcaggacgatatgtcgggtcggttactgttttccgccctgttagccgcagcaaagcgtggcgttcgcgtccgtttgttgctggacgacaacaatacgcccggacttgacgacattttacgcttgcttgacagtcatccacgcattgaagtccggctttttaatcctttctcgtttcgcttgctgcgtccgcttggttatatcaccgacttttcccgtcttaatcgccgtatgcacaataaaagtttcactgtcgatggcgtggtgaccctggtgggaggacgaaatattggtgatgcctattttggagcaggggaggagccacttttttcggatttagatgtcatggcaataggacccgtggtagaggacgttgccgatgatttcgcccgctactggtattgcaaatcggtttcacccttacagcaggtgctggatgtcccggagggtgaaatggcggatcgcatcgagttacccgcctcctggcataacgatgccatgacgcatcgttatttacgcaaaatggaatccagtccatttataaatcatctggttgatggaacattgccgcttatctgggcgaagacacgtttattaagtgatgatccggcgaaaggggagggcaaggcaaaacggcattcactattaccgcagcgcctgttcgatatcatgggctcacccagtgaacgcatcgatattatctcttcctattttgtaccgacacgcgcaggtgtggcgcaactcttacggatggtgagaaaaggggtaaagattgcgatcctaaccaattctcttgccgctaacgatgttgctgtcgtccatgccggatacgcgcgctggcgcaaaaaattgctccgctatggcgtggaattatatgaactcaagccgacgcgtgaacaaagtagtacgttacacgatcgcggcataaccggtaattccggagccagcctgcatgctaaaacctttagcatcgatggtaaaacggtgtttatcggctctttcaatttcgatccgcgttcaacattgctcaatactgaaatgggcttcgtgatagagagcgaaacgctggcacagttaattgataaacgctttattcagagccagtatgatgcggcctggcagctccgtctggacaggtggggacggatcaactgggttgatcgtcatgcaaagaaagagattattctcaaaaaagaacccgccaccagtttctggaagcgggttatggtcagactggcgtcgatattgcccgtggaatggttattgtaaatgtggcttaacgggctggtgctttatcgttctcacgcttaacaaccggtttaccagagaacaaaaacttcagtaacgggatgcgcaaatgaatttcatacagaattatcgcaatccctactacaaatatcaggccacagagaaaaccaagccagttggaggtgatgtgcggtgtaatgtatgcgccgaaaaacagcgttaacgggtggtgaaccagatagataaacagcgatgcgttaacaaaataagtcacccgcgctgactggaagttaagcaaacggtggccaaaggagaagaccacattcaccatccacagaccgaggaccatggtgatcaccgactcggtttcgtacatccaggcatcgccactgccatagcgctggttgagtaaataagcgacaaacgccaatgctgctgcaagggtacagccacgagacggcgtggtaaacaaggctttaagatgagggaaaatgaaagccagtgcgccgaggataaagaacggcaaataaaacagcgtttgcatgacaataaaattgaacatgccattactcagaatgggcggatacacaataaaaatcgttcttcttattaccgcataaccgatgccgaggcataaaaaaatcaccgatagttttaccatcgagaattttttattcgttttatcagaattttctaaattatttctgatgcgcttaaatatccatacgcacagcgtcgtcatgactactaacaccagtaaaaaccacaggtgtgatattaattcccagaccaacgtattatatttgtcatacaatgacagcccaggccaactttccgcttttcctttgacatattgcagcataataaattgcggtaatgtcagtagggggatggctgttaacatcgggatacctacacgttcgacacgtactttccaccattttttcaagggatagcgtaaaaaaagcatgtaggaaaagtagccggatataacgaaaaatacctgcatgcggaacgagtggatgaagtcattaaaaagggtcagccacaatgatggttcggcgctattcacatgccatgtatggctcgaatagattaaagaaatatgaaaagggatccctaacaacatcagccaggcgcggatggagtcgaggaaatattcacgttgcgcgggtactggattcatatatggttaactaatctcggatttttcgtcttatccctgtcgggttatgcctttaggcttgttgccatagcgacaccgacctgaccgcgccaggcgcaggcttcaaggtttttatgcatagcatcatcgctaccactaaccagaatggaagcgtctgtaagacggttgataaataaaattgctggcaaaccctacacgaagtcgatgcttctgtctttaggagaagcacggaaagtgaaaacggttgcaatcaggtgcttaatccatgagccagcgtgctgaacgataccgggattctgttgtcggaatggctggttatccattaaaatagatcggatcgatataagcacacaaagggggaagtgcttactaattatgaaacataaactacaaatgatgaaaatgcgttggttgagtgctgcagtaatgttaaccctgtatacatcttcaagctgggctttcagtattgatgatgtcgcaaagcaagctcaatccttagccgggaaaggctatgaggcgcccaaaagcaacttgccctccgttttccgcgatatgaaatacgcggactatcagcagatccagtttaatcatgacaaagcgtactggaacaatctgaagaccccattcaaactcgagttctaccatcagggtatgtacttcgataccccggtcaaaataaatgaagtgactgccaccgcagtcaaacgaatcaaatacagcccggattatttcactttcggcgatgttcagcatgacaaagacacggtaaaagaccttggttttgccggttttaaagtgctttacccgatcaacagcaaagataaaaacgatgaaatcgtcagcatgctcggggccagctatttccgcgtgattggtgcaggtcaggtttatggcctttctgcccgcggcctggcaattgataccgccttgccatcgggtgaagaatttccacgcttcaaagagttctggatcgagcgtccaaaaccgactgataaacgtttaaccatttatgcattgcttgactcgccgcgcgcgacaggtgcttacaaattcgtggttatgccagggcgtgacacggttgtggatgtgcagtcgaaaatctatctgcgcgataaagtcggcaaactgggggttgcaccgttaaccagtatgttcctgtttgggccgaaccaaccgtcgcctgcaaataactatcgtccggagttgcacgactctaacggtctgtctatccatgccggtaatggcgaatggatctggcgtccgttgaataacccgaaacatttagcggtcagcagcttctcgatggagaacccgcaaggcttcggtctgttgcagcgcggtcgtgatttctcccgctttgaagatctcgatgatcgttacgatcttcgtccaagcgcatgggtgactccgaaaggggagtggggtaaaggcagcgttgagctggtggaaattccaaccaacgatgaaaccaacgataacatcgtcgcttactggacgccggatcagctgccggagccgggtaaagagatgaactttaaatacaccatcaccttcagccgtgatgaagacaaactgcatgcgccagataacgcatgggtgcaacaaacgcgtcgttcaacgggggatgtgaagcagtcgaacctgattcgccagcctgacggtactatcgcctttgtggtcgattttaccggcgcagagatgaaaaaactgccagaggataccccggtcacagcgcaaaccagcattggtgataatggtgagatagttgaaagcacggtgcgctataacccggttaccaaaggctggcgtctggtgatgcgtgtgaaagtgaaagatgccaagaaaaccactgaaatgcgtgctgcgctggtgaatgccgatcagacgttgagtgaaacctggagctaccagttacctgccaatgaataagacaactgagtacattgacgcaatgcccatcgccgcaagcgagaaagcggcattgccgaagactgatatccgcgccgttcatcaggcgctggatgccgaacaccgcacctgggcgcgggaggatgattccccgcaaggctcggtaaaggcgcgtctggaacaagcctggccagattcacttgctgatggacagttaattaaagacgacgaagggcgcgatcagctgaaggcgatgccagaagcaaaacgctcctcgatgtttcccgacccgtggcgtaccaacccggtaggccgtttctgggatcgcctgcgtggacgcgatgtcacgccgcgctatctggctcgtttgaccaaagaagagcaggagagcgagcaaaagtggcgtaccgtcggtaccatccgccgttacattctgttgatcctgacgctcgcgcaaactgtcgtcgcgacctggtatatgaagaccattcttccttatcagggttgggcgctgattaatcctatggatatggttggtcaggatttgtgggtttcctttatgcagcttctgccttatatgctgcaaaccggtatcctgatcctctttgcggtactgttctgttgggtgtccgccggattctggacggcgttaatgggcttcctgcaactgcttattggtcgcgataaatacagtatatctgcgtcaacagttggcgatgaaccattaaacccggagcatcgcacggcgttgatcatgcctatctgtaacgaagacgtgaaccgtgtttttgctggcctgcgtgcaacgtgggaatcagtaaaagccaccgggaatgccaaacactttgatgtctacattcttagtgacagttataacccggatatctgcgtcgcagagcaaaaagcctggatggagcttatcgctgaagtcggtggcgaaggtcagattttctatcgccgccgccgtcgccgcgtgaagcgtaaaagcggtaatatcgatgacttctgccgtcgctggggcagccagtacagctacatggtggtgctggatgctgactcggtaatgaccggtgattgtttgtgcgggctggtgcgcctgatggaagccaacccgaacgccgggatcattcagtcgtcgccgaaagcgtccggtatggatacgctgtatgcgcgctgtcagcagttcgcgacccgcgtgtatgggccactgtttacagccggtttgcacttctggcaacttggcgagtcgcactactggggacataacgcgattatccgcgtgaaaccgtttatcgagcactgcgcactggctccgctgccgggcgaaggttcctttgccggttcaatcctgtcacatgacttcgtggaagcggcgttgatgcgccgtgcaggttggggggtctggattgcttacgatctcccgggttcttatgaagaattgccgcctaacttgcttgatgagctaaaacgtgaccgccgctggtgccacggtaacctgatgaacttccgtctgttcctggtgaagggtatgcacccggttcaccgtgcggtattcctgacgggcgtgatgtcttatctctccgctccgctgtggtttatgttcctcgcgctctctactgcattgcaggtagtacatgcgttgaccgaaccgcaatacttcctgcaaccacggcagttgttcccggtgtggccgcagtggcgtcctgagctggcgattgcactttttgcttcgaccatggtgctgttgttcctgccgaagttattgagcattttgcttatctggtgcaaaggaacgaaagaatacggcggcttctggcgcgttacattatcgttgctgctggaagtgctgttttccgtgctgctggctccggtacgcatgctgttccatacggtcttcgtcgtcagcgcgttccttggctgggaagtggtgtggaattcaccgcagcgtgatgatgactccacttcctggggtgaagcgttcaaacgccacggctcacagctgctgttagggttagtgtgggctgttggtatggcgtggttggatctgcgtttcctgttctggctggcaccgattgtcttctcgttgatcctgtcaccgtttgtttcggtgatttccagccgtgccaccgttggtctgcgcaccaaacgctggaaactgttcctgatcccggaagagtattcgccgccgcaggtgctggttgataccgatcggttccttgagatgaatcgtcaacgctcccttgatgatggctttatgcacgcagtgtttaacccgtcatttaacgctctggcaaccgcaatggcgaccgcgcgtcaccgcgccagtaaggtgctggaaatcgcccgtgaccgccacgttgaacaggcgctgaacgagacgccagagaagctgaatcgcgatcgtcgcctggtgctgctaagcgatccggtgacgatggcccgtctgcatttccgcgtctggaattccccggagagatattcttcatgggtgagttattacgaagggataaagctcaatccactggcattgcgtaaaccggatgcggcttcgcaataaaaacgtagttgcctgatgcgctacgcttatcaggcctacatcgttcctgcaatttattgattttgcaagattttgtgggtcgggtaaggcgttcacgccgcatccggcaaaaacaacgagccaataaaaataccggcgttatgccggtatttttttacgaaagaggtatcaaatgcgtttaattgtggtgagcatcatggtgaccttgctgagtggctgtggcagcattattagtcgcactataccggggcaggggcatggcaaccaatattatcccggtgtgcaatgggatgtgcgtgactccgcctggcgttatgtcacgatccttgatctgccattctctctggtttttgatactttactgctgccgatcgacattcatcatggcccgtatgagtgattaacgttcatcccactcatcagctgctgcgcgtccttcctcggtatccagcggtggctcaagctgaaattccccctcgtcccattcatgtaatgtattctcttcctgccactcctggcgtatctctatctcatcatagtcgccatcaaaaacactttgcgcggcttcaccgctaagcataggtaaacattcaccttcttccccttcgtcggcaaaaaactcaacttgccacatgatgtcgccgtcctgcaaaacgtatttttgggcattgaactgttgcacattcgcatcttcagcgtcgatgccggggttgtctgcaagaaattcttcgcgtgcagcgtcaatggcttcttcaagcgttgcgtacatggtcatcacgattctccctttgagttgatgaggtttcagggaaaaggatagctgattctccgcttttgcaagtatgaaaggcgaaaaatcagttcgatacctggggtattcgacgacgacgtagactgttccatgaatagactgcgttgaataacactacgccagcggtgacgagaaataccgctctgaaaccgtagttcgctgaaatcgctgctcccatcaatggtccggtaacgttgccaatatcacgaaacgattggttatagctgaagatacgcccggcgatctggttgctcgagttgtaaaccaacagtgtctgtacggcggggagtagtgcaccatcggcggcaccgagcaaaaaacgtaaaatcccaagttgcaatggcgtctgaacgtaagacattgggatcaacagcagtacagaaaagatcagcgctgtaatcaggatcttttcgggtccgattcgatcgccaagtttgccgagtcgtggtgcgcttagcagagccgccacgcctggcaccgaggcgatcatgccactgataaaggcgacgttactgacgttacccgccagttcgcggacatacagcgtcagaatgggggcaattgagcctgtcgccacctggatgattaacgtggtgacaaacaggctgagtaccagtttcgggtttttaagtgatgtcaccacttcccgcatgtgcagcatctcttttttgctgaccggctggaatttttctctgatgcagaacagggtgacgaaaaagcagagtatgagcacactggcggtaataaagaataccggacgtaagccgtagctatcggcgagcaggccgccagccattgggccgagcaacgcaccactaacgccgcctgtggagagcgtacccagcgcccagccgcttttattacgcggtacttgtgtggcgataagagcattagcgttggggacaaatccgccaagtaacccaagaagcgcccgtaggatcaaaaactgccagatattttgtgccagtcccatcaacaccatcacgatgcccatgccgagggcagagcgtaatagcatgagttttcggcctttacggtcggcgagtccaccccaaaacggtgaggcgatggccgaaaataaaaatgtaatgctgaagacaataccggaccacatattcagggcggagtgaccggtaacgccaagctgctcaacgtagaggggtaagaagggcattaccagactgaaggcggcaccggtaagaaaacagcctagccaggcgacgatcaggtttcgtttccagtttataggggtgtcattttcacagggtgacatagcaatccgctgttggtgcgccaggcgcggtgaacataagaagaaaagataagcacactaattatgcgcccgacttccagggggcgcaatccagagagcttttatcgctaaatcagggggatttgctgtggtaatgccggatgccattctgaagcatccggcaggggagatttaatagcgtgaaggaacgccttccgggcgtgttttaaagcgacggtgtaaccacatatactgctctggtgccatcatgatgcatttttcgaccactttgttcatccacgcggcggtagtttcggcatcatccagtggcggagaacactctggcggcagcataatcaattgataccctttgccatctggcttacggcgtggaacgaagggcaccagacatgcgccggacatccgtgccagcatccaggttccggtcgtggtcgcagcctgctcaacggcaaataacgggacgaaaacgcttgagcgcgggccgtaatcatgatccggtgcgtaccagaccacttcgccttttttcagggctttaatcatgccttttaaatctttgcggtcgagcatcgatttatttgagcgcaaacggccccaggtttgtagccagtcaatcagtggattatcgttcgggcggtaaacgccaatccccggttcctgcataccaaactgccgcgcacccagctccagtgtcagaaaatggatgccaactaacaggatgccgcgtttttgcgcctgcacgtcacgaatgtgttccatgccgatcacttccgtccagcgggcgattcggcggtccggccagaaccacgccatgccggtttccatcaggcccatgccaacggattcgaaattcttcaccaccattttacggcgttcttgttcgctcatttccgggaagcacagttccaggttgcgatgcacaatttttgcgcgtcgtttcataaaacgtaacgccagttttcctaatccacaaccgaggcggtagataaccgggtagggcaattgcacgactaaccaaagtacgccaatacccaaccaggttaaccaataacgcggatgaagcagtgcggtggagaacttgggtagattcgtcatatcaatcctgtttttcaacctattcgggcaattgtatgtattgtcgcattttttcgcccgcaaccaaaatttgtggctgaagactgggcgaaattgccgcgcttgtaaataacaaataatttttaatgcgcaaatgtagcgtaaaatgtgtggatgttaattatcgataattgctatatcatgccgcggatttttactttcccatctcgcaggaaccgtacaccatgccagtgttacacaaccgcatttccaacgacgcgctaaaagccaaaatgttggctgagagcgaaccgcgaaccaccatttcgttttacaagtatttccacatcgccgatcctaaggcgacccgtgacgctttatatcagctgtttaccgcgctgaatgtttttgggcgagtgtatctggcgcatgagggcattaacgcgcaaatcagcgtacctgcgagcaatgttgaaacatttcgcgcgcagctctatgccttcgacccggctttagagggtttacgcctgaatatcgcgttggatgatgacgggaaatctttctgggtactgcgcatgaaggtacgcgatcgcattgttgccgacggtattgacgatcctcactttgatgccagcaatgttggtgagtatctgcaagcggcggaagtgaacgccatgcttgacgatcccgatgcactatttatcgacatgcgtaaccactatgagtatgaagtggggcactttgaaaacgcgctcgaaattccggcagataccttccgtgagcagctgccaaaagcagtcgagatgatgcaggcacataaagataaaaaaatcgtcatgtactgcaccggcggcattcgttgtgaaaaggccagtgcctggatgaaacataacggattcaacaaagtctggcatatcgagggcggaattattgaatacgcccgtaaggcgcgcgagcagggcttgccggtgcgttttattggcaaaaattttgtttttgacgagcggatgggcgaacgtatatcggatgagattatcgcgcattgccaccagtgcggcgcgccgtgcgacagccataccaactgtaaaaatgatggctgccacctgctgtttattcagtgtccagtatgtgcggaaaaatacaaaggttgttgtagtgagatttgctgcgaagaaagcgcgttaccgccagaagaacagcgacgccgtcgggcaggacgtgaaaatggcaataagatctttaataagtctcgtggacgtctgaatacaacactgggcattccnnnnnnnnnnttcctgatccaacggaataaatatcattgccggatgcgtgccatccggcaacatttcactcttacttctgctgtacgccttccactgaaataatcagatccacttcctgagaagctggacctaaatctgtcttgatattgaagtccttgagcttaattttgccttcggcctcgaagcctgcacgtttaccaccccatgggtcgtcgccctgaccaattaatttcgcttccagcgtgacgggtttggttacgccattcagcgtcagatcgccggtaatatccagttcgtcaccgtctttcttcacgctggtggaggtgaatgttgcctgtggatattttgcggtattgaggaaatctgcactgcgaagatgtttatcgcgttcggcgtgattagtatcgacgctggtggtgttaattgtcacattcactttatcggcagccggatttttttcgtcaaaggtaaaagtaccgtcgaaatctttaaaggtgccgtataaccagctatagccaaggtgctggatgcggaaattaacaaaggcgtgctgaccttctttgtcaattttgtaatcggcggcaaccgctgaaccggcagagaacatcagggacgcgaaggttaaaccaagcaggctttttttcattttttatactccatagtcagatgacgactttcccagcatgcgcttcagagtgtcgtctttatcgatgaaatgatgcttcagggccataaatccgtgcataacggacagtactacgacgctccacgcgagccaaaaatgcagggcaccggcaaagtctgcctgtgcgccagcgtcggcaagggtcgcggggacgtcaaaccagccaaaaacgctgatcggtttaccatcggcagatgagatcagatagccgctgatgccgatggcgaacagcaataggtacaatgcgagatgtccagcctttgcggcaagacgagtcatgggcgaataactcggcagcggacccggcggtggagatatgacacgccacagaacgcgaataaccagcccc

SEQ ID NO: 281 - DNA, 13837 bp, Escherichia coli
  source 1..13837: mol_type = genomic DNA
tcggcgcgtgacctttatgtaccgccaacagtacgataaagacgatcaggatgctgattaccgatgcggtcataataagtttattcatcaaatcatttatgtaatgaagatgaaaatcgatcgaaagcgcgatgtagagcgtataaatcggtttgccgtccaccaacgggccaaccgacaagttaatcatccgccagttgctgtgttccatatgcccgtgaccgtggcctggcatcataatcgtcgggccggaaaggagatacacctcgccaccccgcgcgtctttatcgggtatggcatcacgtgcaaactcgcggatatcaggcgcaccgggggagtgatacaccgttttgccgtggctatctgccagggaaatcaacacgttggaataaccactgacgatatcttccagcgtcattaagcgtcgggcttgcgtttcgtcagggtgattaagtacccgttcaagcgtggcgctaatctcttttaaatcattaatatcctgctcggcaaaatgcacttttactgagtggatcatgatccatgcaaaggcgaaaaacgccgcgatggtggccaggctgataaaaaaggtcaggcgggttgccagcgaaaacgggcgctgaaatggcttactgaccatccggcacctcaagcatgtagcccacgccgcgcacggtctgaattagcttcggctcaaagtcgttgtcgattttgccgcgcagccgcttcaccgctacatcaatggcgttagtgtcgctgtcgaaattcatgtcccacacctgcgaggcgataagcgagcggggcagcacttcgccctgatggcggaggaaaaactccagcagagtaaactctttactggtcagagtgatgcgcgtgccgctgcgggtgactttgcggctgacgagatcgaccatcagatcggcaacctgaaactgactttcgataatcatcgccgccccgcgccgcaggagagtgcgcacccgcgccagcagttcagcaaaagcgaacggcttcaccagatagtcatccgcccccaactccagccccttgacgcgatgttcaatggtgccaagcgcggtaagcaacagaatcggcatccctttattggcggaacgcaacatgcgcacgatatcccagccgttcacgtccggcagcataatatcgaggattatcagatcataatcaccggtcatcgccagatggtagccattcaacccgttgtcggccaaatcgaccacaaaaccggcttcggttaaccctttggtcaagtattctccggttttcttttcatcttcgacaatcaacagtttcatatttcctccgcatgttgcccgggcaattctagagtagcgggatcagatggcaatcgcttattggcaaaatgacaattttgtcatttttctgtcaccggaaaatcagagcctggcgagtaaagttggcggcataaaatcaccagaaattatgagcctatgtctccttgtaaacttctgccattttgtgtggcccttgcgctaaccggttgttcactggcaccggattatcagcgtccggcaatgcccgtgccgcagcagttctcactcagccagaacggcctggttaacgcagcagataactatcagaacgcgggctggcgcaccttttttgttgataatcaggtgaagacgctgattagcgaggcgctggtgaataatcgggatttgcgcatggcgacgctgaaagtgcaggaggcacgggcgcaatatcgtctgaccgatgccgaccgctacccacagctcaatggcgagggcagcggcagctggagcggtaatcttaaagggaataccgccacgacacgggagttttcgaccggccttaacgccagctttgacctcgattttttcggtcgcttaaagaacatgagcgaagccgagcgacaaaattatttagccactgaggaagctcagcgcgcggtgcatattctgctggtttctaatgtcgcgcaaagctatttcaatcagcaactggcgtatgcgcaattgcaaatagccgaagaaacgctgcgtaattatcagcagtcatatgcgtttgtcgaaaaacaactgttgacaggtagcagtaatgttctggcgctggaacaggctcgcggggtgatagaaagtacccgcagcgacatcgctaaacgtcagggggaactggcgcaggcgaataatgcattgcaactgttgctgggaagctacggcaagctgccgcaagcgcagacagtaaacagcgacagcctgcaaagcgttaaattaccggcgggattgtcgtcgcaaatcttattgcagcgcccggatattatggaagctgaacacgcgttaatggcggctaatgccaatattggcgctgcacgcgcggcattttttccgtctataagcctgaccagcggaatatcgaccgccagtagcgatctatcgtcattatttaacgccagcagcgggatgtggaattttatacccaaaattgagatccccatttttaatgccggacgcaaccaggccaatctggatatcgccgaaattcgccagcagcagtcggtggtgaattatgaacagaaaatccagaacgcctttaaagaagtggcagatgcgctggcattacgtcaaagcctgaacgatcaaattagcgcccagcagcgttatctggcatcgctgcaaattactttgcaacgggcgcgggcattatatcagcacggcgcagtaagttatctggaagtgctggatgccgagcgttctttatttgcaacccgacaaactttacttgatctgaattatgcccgtcaggttaacgaaatttctttatataccgcacttggtggcggttggcagcaataacttttaactccaggagagaataaatgaaaaaagcactgcaagtcgcaatgttcagtctgtttaccgttattggctttaatgcccaggctaacgaacatcatcatgaaaccatgagcgaagcacaaccacaggttattagtgccactggcgaggtaaagggtattgatctggaaagcaaaaaaatcaccatccatcacgatccgattgctgctgtgaactggccggagatgaccatgcgctttaccatcaccccgcagacgaaaatgagtgaaattaaaaccggcgacaaagtggcgtttaattttgtccagcagggcaacctttctttattacaggatattaaagtcagccagtaacccaggtttaatgagatgaaaaaaatcgcgcttattatcggcagcatgatcgcgggcggtattatttctgcggcaggctttacctgggttgcaaaggcggaaccgcctgcagaaaaaacgtcgaccgcagaacgtaaaatcttattctggtacgacccaatgtatcccaatacgcggttcgataaaccaggtaaatcgccgtttatggatatggatctggtgccgaaatatgccgatgaagagagttctgcgtctggtgtgcgcattgacccgactcagacgcagaatctgggggtgaaaacggctaccgtcacgcgcggaccgctgacttttgcccagagtttcccggcgaatgtcagttacaacgagtatcagtatgccattgtgcaggctcgcgctgccgggtttatcgacaaggtgtatccgcttaccgtgggcgataaagtacaaaagggcacaccgcttctcgacctgaccattcctgactgggtggaagcgcagagtgagtatttactgctgcgcgaaaccggcggtacggcgacccagactgaaggcattcttgagcggctgcgactggcgggaatgccggaggcggatattcgccgcctgatcgccacgcaaaaaatccagactcgctttacgctcaaagcgcccattgatggcgtgatcaccgcgtttgatctgcgcgcgggaatgaatatcgccaaagataacgtggtcgcgaaaattcagggtatggacccggtgtgggtcactgctgcgatcccggagtccatcgcctggctggtgaaagatgcctcgcagtttaccctcaccgttccggcgcgaccggataaaacactcaccatccgcaaatggacgctgctacctggcgtggatgccgcgacccgcacgctgcagctgcgtctggaagtcgacaacgccgacgaggcgctaaaaccgggcatgaacgcctggttgcaactcaacaccgccagcgaaccgatgctgctcattccgtcacaagcgctgattgataccggcagcgaacagcgggtgattaccgttgatgccgacgggcgctttgtaccgaaacgcgttgctgttttccaggcatcgcaaggcgtcaccgcattacgctctggtctggcggaaggtgaaaaggtggtttccagcggcctgttcctgattgattccgaagccaatatttctggcgcactggagcggatgcgctctgaaagtgctacccatgcgcattgagggaataaccaatgattgaatggattattcgtcgctcggtggcgaaccgttttttggtgctgatgggcgcgttgtttctgagcatctggggcacctggaccatcattaatacgccagtggatgcgctgccggatctctccgatgtgcaggttattattaaaaccagctatcccggtcaggcaccacaaatcgttgaaaatcaggtgacttatccgctaaccaccaccatgttgtcggtgcctggcgcgaagactgtgcgcggtttctcacagtttggcgactcttatgtgtatgtcattttcgaagatggcaccgatccgtactgggcgcgttcgcgggtgctggagtatctcaaccaggtacagggtaagctgcctgcgggagtcagcgccgagctggggccagatgccacgggtgttggctggatctatgaatatgcactggtggatcgcagcggtaagcacgatctggccgatttacgctcattacaggactggtttctcaaatatgagctgaaaaccatccctgacgttgcggaagtggcgtcggtgggcggtgtggtgaaagagtatcaggtggttatcgatccccagcgcctggcgcagtatggcatcagtctcgccgaagtaaaaagcgcgctggatgcttcaaaccaggaagcgggcggttcgtcgatcgaactggcggaagcggaatatatggtgcgcgccagcggctatctgcaaacgctcgacgactttaatcacatcgttttaaaagccagtgaaaatggcgtgcccgtttatctgcgcgatgttgcgaaggtccagattggcccggagatgcgccggggcattgccgaactaaacggcgaaggcgaagtggcgggcggggtggtgatcctgcgatccggcaaaaacgcccgagaagtgatcgccgccgtgaaggacaaactggaaacgctgaaaagtagtctgccggaaggcgtggagatagttacaacatacgatcgcagccagctcattgaccgcgccatcgacaacctcagcggcaagttgctggaagagtttattgtggtggcggtagtctgtgcgctgtttctctggcatgtgcgctcggcgctggtggcgattatttcgttgccgctggggttgtgtattgcttttattgtcatgcacttccagggactgaatgccaatattatgtcgttgggtggcattgcgattgccgtcggggcgatggtcgatgctgctatcgtcatgatcgagaatgcgcataaacggctggaagagtggcagcaccagcatcctgacgccacgctggataataaaacgcgctggcaggtgatcaccgatgcgtctgttgaagtggggccggcgctatttatcagtctgctgattatcacgttgtcgtttatcccgatcttcaccctggaagggcaggaagggcgtctgtttggcccgttggcgttcaccaaaacgtatgcgatggcgggtgcggcgctgctggcgatcgtagtgatcccgatcctgatgggctactggatccgtggcaaaattccgccggaaagcagtaacccgctcaatcgctttttgattcgtgtttatcatccgctgttgctgaaagtactgcactggccgaaaaccacgctgctggtggcggcgctttcggtgctgacggttctctggccgctcaataaagttggcggggaatttttaccgcagatcaatgaaggcgacttgttgtatatgccatcgacgctgccggggatttccgcagcagaggcggcgagtatgctgcaaaaaaccgacaagctaattatgagcgtacctgaagtggcgcgggtatttggcaaaaccgggaaagcggaaaccgccaccgattctgctccgctggagatggtagaaacgaccatccagcttaagccgcaggagcagtggcggccaggcatgacgatggacaaaatcattgaggaactggataacaccgtgcggctgccggggctggcgaatctgtgggtgccgccaattcgtaaccgtatcgatatgctctcaaccggcattaaaagccccatcggcattaaagtttccggcactgtgctggcggatatcgacgcgatggctgagcaaattgaagaagtagcgcgaacggtgccaggcgtagcttctgcgcttgccgagcggctggaaggtgggcgctatatcaacgttgagattaaccgtgaaaaagccgcacgttacggtatgacggtggcggatgtgcagttgtttgtgacttctgcggtgggcggggcgatggttggcgaaacggtggaagggattgcccgttatccaattaatctgcgttatccgcaaagctggcgcgatagtccgcaggcactgcgccagctgccgatcctgacgccgatgaagcagcaaatcaccctggcagacgtggccgacattaaagtctctaccggaccgtcgatgctgaaaaccgagaatgcgcgcccgacgagctggatttatatcgatgcccgcgatcgtgacatggtgtcggtggttcacgatttgcaaaaagcgatagctgaaaaagtgcagttaaaaccgggcaccagcgtggcattctccgggcagttcgagctactggagcgcgccaaccataagcttaaactcatggtgccgatgacgttgatgattatcttcgtgctgttgtatctggcgttccgtcgggtgggcgaagcgttgctgattatcagcagcgtaccgtttgcgctggtgggcggcatctggttgctgtggtggatgggctttcatctttccgtggcgacgggcactggctttatcgccctcgccggggtcgccgccgaatttggcgtggtgatgctgatgtatttacgtcacgccatagaggccgtgccgtcgttgaataatccacaaacattcagcgagcagaagctggatgaggcgttatatcacggcgcggtcctgcgcgtgcgcccgaaagcgatgacggtggcggtgattatcgccggtctgctgccgattctgtggggaacgggggctggttcagaggtgatgagccggattgccgcgccgatgattggcggcatgatcaccgcacctttgctgtcgctgtttattatcccggcggcgtataagctgatgtggctgcaccgacatcgggtacggaaataaaagcaggataccccgtttaaccgtgtggattgtgtcttgcgacgatgggcactaaatgttaaaaggtgcccctcaacaaaaaagacacacaggggaaaggcgtgaaaaacgcgtcaaccgtatcggaagatactgcgtcgaatcaagagccgacgcttcatcgcggattacataaccgtcatattcaactgattgcgctgggtggcgcaattggtactggtctgtttcttggcattggcccggcgattcagatggcgggtccggctgtattgctgggctacggcgtcgccgggatcatcgctttcctgattatgcgccagcttggcgaaatggtggttgaggagccggtatccggttcatttgcccactttgcctataaatactggggaccgtttgcgggcttcctctctggctggaactactgggtaatgttcgtgctggtgggaatggcagagctgaccgctgcgggcatctatatgcagtactggttcccggatgttccaacgtggatttgggctgccgccttctttattatcatcaacgccgttaacctggtgaacgtgcgcttatatggtgaaaccgagttctggtttgcgctgattaaagtgctggcgatcatcggtatgatcggctttggcctgtggctgctgttttctggtcacggcggcgagaaagccagtatcgacaacctctggcgctacggtggtttctttgccaccggctggaatgggctgattttgtcgctggcggtaattatgttctccttcggcggtctggagctgattgggattactgccgctgaagcgcgcgatccggaaaaaagcattccaaaagcggtaaatcaggtggtgtatcgcatcctgctgttttacatcggttcactggtggttttactggcgctctatccgtgggtggaagtgaaatccaacagtagcccgtttgtgatgattttccataatctcgacagcaacgtggtagcttctgcgctgaacttcgtcattctggtagcatcgctgtcagtgtataacagcggggtttactctaacagccgcatgctgtttggcctttctgtgcagggtaatgcgccgaagtttttgactcgcgtcagccgtcgcggtgtgccgattaactcgctgatgctttccggagcgatcacttcgctggtggtattaatcaactatctgctgccgcaaaaagcgtttggtctgctgatggcgctggtggtagcaacgctgctgttgaactggattatgatctgtctggcgcatctgcgttttcgtgcagcgatgcgacgtcaggggcgtgaaacacagtttaaggcgctgctctatccgttcggcaactatctttgcattgccttcctcggcatgattttgctgctgatgtgcacgatggatgatatgcgcttgtcagcgatcctgctgccggtgtggattgtattcctgtttgtggcatttaaaacgctgcgtcggaaataaggcattcacgctacatccgacaaaacgatgtccgctctcatccattcgatgagagcggtttttttaattactgcttaaatgcacccgccagagagcgaatatcattgccggttggcgactgatgaagtcgcagaccaaactcttcgacaatcgcaaatatgtgatcgaatatatcagcctgaatgctttcatattccagccacaccacggtgttagtaaacgcgtagatctcgagcggtaaaccgttatcacctggagccagttggcgtaccattaaggtcatatctttacgaatccgcggatggttacgcagatattcgttcagataggcacgaaaggttccaatattggtcattcggcgcaggtttaatatcgactccgtagaaccttgctggcgattccactcattaatttcctgatggcggctggttaaataaggttttaacaagtgcgctttattcagacgttgcatttcgtcttcatcaagaaaacgaatactggtgacatcaatactgatactgcgcttaatacgtcgcccgccagatgctgacatcccgctccagtttttaaaggagtcagaaaccagagaccaggtgggaatagtggtaatggtattgtcccagttacgcactttgacggtggttaacccaatatcgatcaccgcgccatccgcgccgtatttcggcatctccagccagtcgcccagtttcagcatatcgttcgcggaaagctgaatacctgccaccagaccaagaatcggatctttaaaaaccaacatcagcacggcagccattgcaccaagaccgctgatcagaatcgctggcgactgaccaatcagcagcgagatcatcaaaatgccgaccaggattgcgccgatcagtttaatcccctgaaatatccctttcagcggtaactgagatgccgccgggaatttctgcgccagattcaaaataacatccagcaacgagaagactgaaagcagcgcatacatcatgatccacaactgcgcgcaggtagtcagaatatctgccgcttcggtgcctttttgcagccagaataccgcctgaatattgacgataatcccctgcagggtaaaagctaaacggtggaagagtttattctgggtaatgatttgcaaccaaagccgtgaactggcgatggcacgtttttcgaaggtccgcagtaccacccaatgcaaaataatatgcaccacgacggcggtcagaaaaataataccgaaaatcatcaccatcgaggtggtgtgatcgatctcaatacccgctaaatcttcaacctgggatattaaatcctgcataacgtctcctttatacaacagcagcctatgatgacggctgaaacagggttatgcaaatcaggagaatctgaggggaaatagccgggcagatgcccggcaagagagaattacacttcggttaaggtgatgttttgcggcagacgtgatttcggcagcgtagcgttaaaatcttcaacgctgtgatgacctaccggaacaaccaccagactggtgtagcctttctctttcagaccaaattctgcatcgaggatggcggcgtcaaaaccttcgatgggtaccgcgtccagacccagcgccgccacgccgagcaggaagttaccgacgttgagataaacctgttttgccatccactctgcatcatcatgcagatctttacggtgcatatcagcgaagaacttgcgacctttatcgttcgcggctttcgcttccggcgtggcaaagcggccatcagcatcttcctggtcaacaaccagcttcagccaggcatcgtccatcgcggtttttgcacagaacaccacgacgtgcgaggcatcaagtattttacgttcgttgaacacataattatcggcagcggatttggcaacacgcgctttaccttcttccgtgctggcaacaataaaatgccacggctgggagttggtgctggatgggctgtattgcaggagagttttgatctgctcggcctgttccggggtaagttttttactggcatcaaatgccttagtggaatgacgctttaaggcgacagaaatgatatccataaagactccatgtgaaagtaattttgcgtgccagcagattacaaggttcaacgagaaatggtaagcgagaaaaatgcgctatagatttccgctttagcctggacgcactcttttttgatcgcgtttagccagaccatcaaccaccagattccacgaatcgttgatcagatcgcgaagtaacgcttcggagatttcctcgccgggatacaccgaaatccagtgctttttattcatgtgataccctggcttaatgcttgggtatatttgctgatttaacagggatttttgtggatcggacttcagattgataaaggggacgccgcgtagctccgacgacagcataaaaatcttgccgccaattttaaaaacatcgaactccgggccaaaaggccagcaaagctcgacaaagggtaactcaagggccaggcgtttcgccgtttcgtgcagtgattgcttatccataaacgttcctttaggcgaaggagaataagcaaagtatgccgcgaagtacggcgataatcgacgtttaatccgccagcgagaaccagcgtcgccagataaagcgcagaacaagatactcaatagcgcccagcactaaaaaccacagacaaaacaataaagtgtaaagctgactaagatccatcagatggaacgtgctcaccagtttttgtgccagcgtcagccccaatgcgggggcgggaagcagcaggcaagagaggaaagccatcagcaaaatgcctgctgcggtggtcaaggtttctaaagggtgtttcataacattgttaaatgtaagttaaaacaccattgtcagggatattcttctgtaaggcaattcccgacttagtcaccggcccagatctcacaatgctttttcaccagcccaatcagcgagccgccatcggcgacgaaatcgcgcatcagctgcgcttcattcagaccgctgacgacctggcgatgcagtgcttcaattgcgctcgatgcgccaattttatgtgcggaaggggcgattttttccagcaatcgcaagatatcttccgttagcggtcgacgatcaccagtgtgcggatcggtaatgacgccttccagcccatagcgacaggcctggaaacggttgaatttatacagcaggtaatctttctcctgatgtttgaacgggcgttccgtcagtaaccagtgggcggtggcctgaattaatcccgccatatttaccgcgtggctaagggttaacggggtatccatcacccgaacctccaccgtgccaaaatgaggactggggcgaatatcccagtgcagatctttaatgctgtcgatcatcgtggtgtaactcaaacagcgaaatagggcttcaaattgttgccagttactgacccacggcatcgggccattatcaggaaaggcggaaaaaatattcggtcgtgaggaggcaaaacgcgtatccgttccctgcatatatggcgacgcggcggaaagggcgataaagtgcggcacaaatcgtgacaagccgtgcagcaaataaatggcgtcatcgccactggcgcagccaacatggacatgctgaccaaaaacggtcgcctgctgaatgagataaccaaagttttccagcgtgcgttgatagcgttcgttatcgcatacctcctgacgctgccatttctgaaacgggtgcgtgccaccgccgcaaatttccagatgatggtctgtggctgcctgcaatacgactttctgcatcgctgaaaactgcccggcagcctggttgatatcacggcaaacatccgtcgccagctccagcatactttcggtgatatcgtgctttacctctccggccgtgatcttatttttaaccgcgtcaatcagcattgaagagtcctggcttaagtcatagcccggcggattaaccacctgcatttccagttcaataccgagggtaaaaggttcagaaacatgaaaatcgggtaatggcataggtttctcttatgttggcgttttctattcagtatagaagtcggagcggctgggcgagatgcggaagttctggaatgtttcttttttttggtgatggtgaactgatggtgcctgaagcaatttggctacttttgcaatgtgacaagttatggcagtgctgactggtggcgaagaattttgacgattgagtcatgcagaaaaaaacgggttcagcttcagttgattaaatgaggagtgagaagtccgaaacaggactcactgtataaataaacagctattttgttgaggaagggtaagataacggcgggtgcctgaagctttccggtttcaggtttactctgaggtctggaaagatgaagccccaggagatatttctatcaaccctggggctgccactccaaacccgaacaatttggatggtagtcccttcttcgcatggaggcaatataaacatgctgacgaaatatgcccttgcggcagtcatagtgctgtgtttaacggtgctgggatttacgcttctggtcggagattcgctgtgtgagttcaccgtaaaggaacgtaatattgagtttaaggctgttctcgcttacgaaccgaagaagtagccgttgtgcggggagcaatcccataagcgctaacttaagggttgaaccatctgaagaatgcgacgcctcggtgcctcgttaagacgatgcctcgcgttcttcaattgcgttttgtaggct

SEQ ID NO: 282 - DNA, 13572 bp, Escherichia coli
  source 1..13572: mol_type = genomic DNA
gtcagtagctgaacaggagggacagctgatagaaacagaagccactggagcacctcaaaaacaccatcatacactaaatcagtaagttggcagcatcaccctcagtatggaataacagcaggacaaagctcgggagacaccatggcattagttcaggctccgggagtagatggtgcttctgtaggttactggcccggtatgaaaactgatttcaggggatataccagttatggatatttaacaccttaccgggaaaataatattgacattaacccggtgacattgccaaagaatgcagagatatcgcagacatctacgcgtgttgttcctacaaaaggagccgttgttttagctaaatttgatacacgtatcggtgggcgactgttattacaattgaaacgttctgataataagccagtaccttttggctctgttgctactgttgaaggccaggcatccagttctgggattgttggggataacagtcaggtatatttaacaggcgttcccaaagaagctactgtaaagattcaatggggtaaagataaaacacagtcatgtcatgccagagtattattacctgaagatgttaatacgacgggaatatataatttaacagcagtatgtactcttaatggttaatggtgttcatttgttagctttaaattaagttgtctcgttatcgtctgtttttctctaatttagagaaaagagtgattaatgacataagataatgtcattagtctttgtctataatcaaaaggaagattgttatgaaaaaaatcaagagcattgctctttcaacaattgctgtggcattgtttggttcagccgcgatggcaaatgctgctgatttaacagcaaatacgtccgttacgacaacagttcaggagcgtagcggttttacagcgtcctataatgaaattcgttcaattaaggaaacagatttaaagaaaatcgttaattttggtcagattaccctgaatgggatgacaggtgatcatctttctataaggaatctagagcttactgatcccaatagaggtgatgggtattttaccttcacttcccctgaagggaattcattcaaggcatctatttacggtgtgaagattaatggtaacatccctcaaccgtggctagccgacaagatatacaatggttataaattgacagtaagtacactgttcaacgaaagcttagttccaggtcgttattctgacgttattactgttattctgaacggccaataaacttcgttagaaataaggaaattaacaatgaaaaaacttacaaaaatcgcattagtcatcggtttattcggaacagcgataactgctaatgctgcaacaagcaatgttactgcaactgcaacaataattggtgacgctacactgagtgccacatatgttgccggagcaccactgactacagataacctgaaatcgcaacagattggtactatttcgcttactggttataacggaactcctgctgtagctgatctgaatctgagcgatactaaagcatctcaaggttttctggagctgaaagatactgcgggtaatgctctgttggcggaggcttttattaatggaggagccattaaacttaatggtgcttatgcagcaggaacccaagccaccggcaatcttccggcagggaccactaatattgatttgaaaacatggggtagtcaggcagatattcctgcaggcgaatatactgacaatgtgacaatcacgttatctaaccagtaattccttttaattacggcaggggaatgattgttcatttctttgccgtaaaatatatggagcgcttttatgaaaaaactttcaaaaatcgcattagccgttggtttactgggttctgcaatggctgctaatgctgctgacattaagcactaatgttactacaaccgcaaaagtaaatgaaactgctaggttgtctgctacatttactcccggtgcatcactgactacagataaccttaaatcacaaacgattggttttattactctcagcggctataaaggatctcccttagtaagagatctgtctttctccgacgtaggcggtgttgctaaaagtctttctctaaatggcatctccggaaatgatactctatacgtgaatgccatttatgataatacaatgctcagtgtcaatggtggcccgatctcgggttcggcgcagaatctctctgaaggtcaggcgagtatagaaatgcgtactattggttcgcaggaaacagtttctgcaggtcaatatacgggaaatgtgccaattactttagctaaccagtaattatataccaaatgaaagcagtaagtcagcaatatattatttgcgttactgctttcatagtcgtagctgtaacaaacagcattagcctaattagctaagaattcatgaatgtaatcagtgcaggcatgttcttacagagcggtactttcatttatctgcacacgaacctccattcctgcatcgtgacaggcctgcagccacagcgctacttccagcggatcgccctcccggcgtaccaccttgccttctttattccataactgcagacaggtgctgccgtcgagacgcaccacaaaatccccacgacaggcctgatacgtcatgccgttcagctccaccggcagatcagtggcagaagtgccgtctgcgggcagacctgctgccgggaccagcggcagtacgacgacttctgccgcacgctgttctgcccggaggcggccctgttctgccagcagcagaggctgtgccacggcccggccggcgtccgtcagctccactgccagttgcaggttcggagcgcgcagggtacgcagccagccggcatcctccagacgacggcaggaagcgcgcaggtttggcccgtagaccggggcttccccgcttcgctccagcacccgttctatgtcccgcgtcagtacgggtcccggccgtttttcatcaagggcagccagcacaatcagcactctccgctgcagtggcgacggtcggcggctctgagtcatttccagtcatcctccggccagatgaggtttctgaggcgctgatggtcggcgtcaatgatctcctgtctctttatggcattcattgaagcatagccatttatggccagttcatgccagaagatcagcacggctccggccctggctgactcgcggagataaatcacgccctggctgtccagattgcattcccggatgcgtttttccgcaaaccgggtcagttgttcatagctgagtgaaaacaccctttcttcatccatcctgcacgctcaatctgataatattcttacaggtaaaaatcatatcctgtatgatttatatgttattgatttatgataataccagatattgttttatgtttaatgataaatatcatgtctgatatgattttatgtgtgttgcttaattatcatatcttttgcatcttttctgccacgcagatccggtttctggtggagtaggatctccgcgaaccgcatccgcgcgctgagacccggtaacacaagatgtagcggctcactcaactgcttttgctaccagatgttgtgttatgacccttccctgtgacccggcgcgcaggggcagaaaagaccgctttgcttattccctgtgcgtggtacacttccggaaagtctcaaataaacaaaaaatcggatctaccagaaacagccatccggtaatttaacatcgtggttatatggatgcttattatttcagtatgtgaaattcattttttgtgaaagtcactttctcaacagagtggcactcatctggcgatgattgaggtgtggtaaaattgcacggctaactattcaactgaggaaaggacatgtttactgcattcaatgagagaaatgatttcagttatgcttttgaaaaaatccgtaatgcgatttccgcgccaggagaaaataatgtttatgctgcaacagaattaggtcttggcattctgctccgtaaatacgagcagtttcgccgggagctggatgcggccggtgagctgggaaactgggaatatgatctcgatacctacaatcactgtattgcggtgctgcaacgttacttcaccggcaatccatccgggctcacagaacgtgatgcccggatttacagccattacctgcagactgagcacaaaggctttgtgaagctggctgaagaactggctgccgaccgctgaatacatacagaaggcgggatttctcaacaataaaggaataaacatggctgactggtttattgcgaccgaaggcgtgaaggtggtgaaggacagcgccagtctggggccgcagataattacagctgtatcgaccatcgcatctgctgtcggagcggtgttccttactcaccacttcacactcagacgtgaggagagaactgcagcagcgaagctggccagcgagcgtctttacattagtacagagctggtttttttacttgagcgatttgcgcagcgttgtgctccagcagcaacagcaactgtggagcacgatcaggatggcagaggagaagctgagttcttattaccggaaatcgattattccccggtatctggtaactggcgctcccttccttctggcctgatgtataggctcagcgaactctctgttctcagctacgaagctgtcgtgtgtgtagataatgtgtttgttgaagatactccttatggtggagcgggtgaatatagtttgcataaaaacgcagctatgttgggagtaaaagcactgcggttatcacgagaactgagaatgttatgtggcctccctctgcacggcctttccgatacactatcgccaacgaggttggtattgttgaaagccagaggtaaaacactccaaaaggagtacgaaatggtaaagaagtctaaaaagaccgagcaagagattgaggatttcataaaggggacatcatgagtggcccacaattgctttccctgcctggttcttttttaacgcctccggcaacattacctgttgccattgattacccggctgcgctggcactacgtcagatggcacttgtgcaggacgaattaccaaaatatctgttggcgccggagatcagcgccctgctccactatgtaccggatctgcaccgcaaaatgttgctggccaccctgtggaacacgggcgcacgtataaacgaagcgctggcgctgacgcggggagatttttctctggcgccgccatatccgttcgtacagctggccacgctcaaacaacggactgaaaaagcgaccagaacggcaggccgtgtccctgctggcagtcaggtgcatcgcctggttcccctgtccgatacacaatacgtcagccaactgcagatgatggtggccacgctgaaaatcccactggagcgcagaaacaaacgaaccggaagaatggagaaggcgcgcatctggggaatcaccgaccgcacagttcgcacctggctgaatgaagctgtagaggccgctgcggccgacggcgtgacgttctctgttccggttaccccacatacttttcgccattcctacgcgatgcatatgctgtatgctggtattccgctgaaggtgctgcagagcctgatggggcacaagtcgattagttcgacagaggtgtacacgaaggtgtttgcgctggatgtggctgcacggcaccgggtgcagttttcgatgcctgagtccgatgctgtcacaatgctgaaaaacagacacgcataagtcacaaatcataattatgaattgtgatttattctataaaagaagagaccactgcaatatgtgatctcttgtatgcaagggtgcttaaacagtgtgaattcacaagtgtgatttcataagtaataacttcttgattattacgttagtgtttttaagtattgctcaagggctactctgacgatggcacttacattttttggatctttaccattgcgtttattcctcaatgccagatcttctattgtgacaagcatgctttcaccaagagagattgtcgtccgacattgtttttctggttcgggtttttccggcgcgccgtatggtttatccgcaaggcgctgagccagagcctctgcttgttctaccgtaactgcagctctgtttaatgcttgctggctgggtttcttcaccatgggccaaatacctcattcattaaatgttcaatttctgctctggctgctgtattgttcgtttctactacaccggtgccgttgctcatgcaatcgcgatagacttttctgaaacaaataactgaatccaggacttgaattgttgggaattcttcaagatattcaaggaattcttttctctcatttcccctcaaaaccggattggttgttgccatactttgtaaacaataaaccttaagttccgggttaaggttacgcattgcgtctatctgttgttctagttctgtaagagtatccagatctggttgagaacactgtagtggcgcaattatttgatgtgcgacaactccactcgttatgaattcctttgagtttcttcctgcgacatccactattacatcatcgaacttttcattcagagcctgtagtgtttgtgtcaggttatcaaatttctcaacaagggttattgctggtaacagtcctgcagcttctcgttccgcatgatgttttgcggctgttcgttgtagatctccgtttaacaggcagacttcccttcctttatttgcgagagcaatagccaggtttgatgcaatggtagttttccctgaaccacctttgttcccaccaactacagtaatcattgcaacctcataaatgtgatgtgtgaagtatgatgatattttgacacggtaacctgatgtgtcaacatgcattcatatttatgaagtatgaaatatgaagtatgtcatatgatgtaataaatattacttgtgttttgtgatttcataactatgatagtgctcaaattgagtattaccttgcaaccagaaacagtgatttactcagattgagtatttaaggggctatagatgaacgtatactgcgatgatggttcaacaacaatcaagttggcatggaatgacaatgggaaaatctgtaagtcgttgtcgcaaaactcatttcgtcatggatggaaggttgacgggttagggattcgccagacatttaactatgaactggatggtaaaaaatacacgtatgatgaagttagcaaccaatctattcttacgactcatattgagtatcaatatacggatgttaacctgttagctgtgcatcacgctttactgaatagtggattagcgcctcagcctgtatcattgactgtgactttgcctatcagtgagttctacacgaaagagtgtcaaaaaaatgaactcaacattcagcgtaaaattgagaatttaatgaggccgattcgtcttaataaaggcgatgttttcaccattgaacacgttgatgtgatgcctgaatcattgccagctgtgttttctcgtctggtcatggataaagttggtcagttcgaaaaatcgctggtagttgatattggcggcactacgcttgatgttggtgttatcgttggtcaatttgactctgtaagtgccattcatggtaattctggcattggtgtgtcttcagttacgaaagctgcaatgagtgcattgcgcatggcatccagtgataccagtttcctcgttgcagatgaattgattaaacgtcgtaatgacccggactttgttcggcaggttataaatgacgaaacaaaaactgatctggtccttaataccattgagggggctattgccagtctgggggagcaagtagtcaatgagctcggtgattttcatcatgtgaatcgtgtttatgttgtcggtggtggggccccgttgatctatgattcgataaaaacggcatggcaccatcttgggcaaaaagtagtgatgatggagtcgccacagacagcactggttgaagctatcgcggctttcaaagaggagtaatattgtggacgatgaacggaaaaggaaaaaattcacactttatctgcatccggaaaaagctgcagactttcaaactttggaagcgatagagtccgttccgcgttctgagcgtggtgagctgttccggaatgcatttatttctggaatggcgttacaccaacttgatcctcgcctgcctgtattgctgactgccattttgagcgaggagttttcagcagatcaggttgtaaccttactcagtcagacgacaggatggaagccttctcaggccgataccagagctgtgttgactgaactcggtgctttgcaatctgctgaaaaaatgcctccttctgctactgattcggtgcaggaggcaatgaatgatgtgcgccttaaaatgcaaaaattattctgatatatcagaatgaagcaatggggatctcagtccattgtgttgtatacgaaggcgagagcatttcccgtttcatttgccattcaggggcggttcctcgccccgcaaaccacactttcccttttccagactggttcagttcatcgagtgttttcattaacttttcgctgtttttacggggctggatctcatcaaataatcccggctgcgctatacccgatggtgtgaaatcagccagcatgactcctgccttcatatagtggtacccttcacgccagacatggtttaacgctctgcatgctgcggcaataatgtcccggctgtcctgtgtgggtaatggaagcttttccacagcggcattgctgtaacagggttcttttactgcaaagggggatgtccgtacaaatgtcgtcacctgccggcaatactgacgctccccacgtagtttctctgcggcccgctctgcatactgaacaacagcctggtgcatggcatctttgtctgtgattcgttcaccaaaactgcgactacagacaatctgctgttttgccggtggtgcttcttccagggatatgcaggactcgccgttgagttcgcgtaccgtacgctcaagaatgacgctgaagtttttccggatgaatgccgtgttagcctgcgccagctgcagtgctgtgttaatacccagcgcattcagcttttccgtcagtctgcgtcctattccccagacctcaccaactggctgcagccccagtagcttcaagatccaattacggttttctgcctccagcgcgaccacaccggaaaactgtggccattgctttgttgcccactgtgcacttttagccagcgtttttgtaggcgcaatgcccacccccatggtgagtcctgtccagctctttacctgttccctgagctgatgaccaaaaacctccggagagatgcaatgatttatcccccgcaaatcaatgaacatttcatcaattgagtagggctcaactgcgggagaaagcgactccagaacagccatgacccgttggctcatgctgtggtacagcgcataattgctggaaaatacatgtattttcttctccaggcgcatctgtctcacctgaaaccagggctgccccattctgatgccaagggcttttgcctccgggctgcgcgcgatcacacagccatcgttattgctgagtacgatgaccggttcgttgcgaaggtccgggcggaaaactttttcacatgaggcgtagaaactgttgatatcagccagtgcaaacatcagcgtaactcccgcgtcctgtgtatcacgtgagtgacaacaccaaaaatacagatgttttccggatacagtgtgcggaattccgggctgtctgaaaccggctccagtgccgggcgtgggcgcaacagcagtcgtttgacggtgaactcaccgtcgatctcagcgataacgatgtccccgtgttgtggtttctcggccctgtccactaccagcagatcaccattctgcacgccagcctggttcatcgattcaccgctggcgcgcagaaagaaggtggctgcaggtctgctgatgcaatagctgttcagatccagttcctgctcagcataatcagtggcaggcgaaggaaaaccggcctggcaacgatcggcaaacaacagtcgcacgtaactgtcatcgcctgaagggtcagccggacggtgataaacggtactcatgctgcaggcagccagctgtcgtcctgccagatttcttccagcagagacatgatacgttctttatccttgtcgttgcgggctcctgtgacagatacagacggggcgctgccctggtctatacgcagccagatttccgggtagtgtggtttcagacgttgttcgatttcattctgtagcgcctgaagtgtgcctgatttgaggttttttgtgctctggcggtcgaaaagaatttcaatgcggatcatgttctcatctccctcttctattgctgtatgtatatacagtattctaataactgaatccacacacagtcaaatgtcattattgtgactaaaaaacgctcaattctctgagggtgtggctgtatgcctgctgtggactgctgtgtccagcttatccacagcattttgcgcacggttctgtgaataaaatacctggttacccaggccgtgccggcacgttaaccgggctgcatccgatgcaagtgtgtcgctgtcgccggcctcctcacccggtcacgtttcgtcgttcctcctccacgcgctgcggcttcggggccgcacctgcattcgtatgcggtcgcccggttacaggtgcggcacggcctgatggaggccgcatgtgagaggagaattcccatgccaaactggtgctcaaatcgtatgcatttttctggtgaaccggcacagattgctgagattaaacgactggccagcggtgcagtcacaccgctttatcgccgcgccacaaatgaaggtattcagctgtttctggccggaagtgccggacttctgcagatcactgaaaatatccgctctgagcagtgccccggagtgacggctgccggacgtggtgctgtatcgacggaaaatatcgcgttcacccgctggctgacacacctgcagaatggtgtactgctggatgagaaaaactgcctgatgctgcatgaactctggctgcagagcggtattggccggcgtcgctggaaaggattaccggatgatgtcagggaaaccatcactgtgcatttcaccgcaaaaagaggtgactggtgtgacatctggggtatccctgctcagtttctgcactgcgtgcagcatccacggcgttcagacccgcgagtgtggtcacacgtcacgcagtccgcttgacccgctggaaaccgctatcggattccacatgcgcgactggtggcagccgacaaaagcaaacttcttcggacacctgaaaaagccgcagattatcgcagccctgaatgaggccggactgtccggtgctgcacgggacgcggagaagatgaagaaaggcgatgcggctgaacatgcagagttccacatgaaagacaaccgctgggtgcctggctggatgtgtgcaccacgcccacagacggatgccactgaacgtactgataacctggctgatgccgcctgatgaacaaccacaccgccccgccggagacggggcggcagcaagggagataccgtgatgaaaactgaactgaccctgaatgtattacagaccatgaacgcacaggaatatgaagatatccgggctgccggaagtgatgaacgccgtgagctgactcacgccgtgatgcgggagctggatgcgccggataactggacgatgaacggcgagtacggcagcgagtttggcggctttttccccgtccaggtccgtttcacgcctgcccacgaacgttttcacctggcgttatgttcaccgggcgatgtctctcaggtctgggtgctggttctggtgaatgccggtggtgagccgtttgcggtggttcaggtacagcggcggtttgcatcggaagccgtcagccattcactggcactggcggcgtcactggatacgcaggggtacagcgttaacgacatcatccatatcctgatggcggaaggaggtcaggtatgagcgtacgttcacaggcactggttcccctcagcacagagcaacaggccgcatggcgggcggtggcggagacagaaaaacgccgccatcaggataacacgctggcggaatatccgtatgcgggggcgtttttccgctgtctgaacggaagccgcaggatatcgctgtctgacctgcgatttttcatgccgtccctgaccgcagaagaactgcacggcaaccgtcttcagtggctgtatgccatcgatgtgctgattgaaacacagggcgaggtctgcctccttccccttccgggcgatgcagcagaacacttgttcccgtcggtgcggtttcgtgtcagggaacgcagtcgccataaatccgcgctggtcatgcagaagtacagccgccagcaggcgagggaggcagagcagaaagcccgtgcgtaccaggcgctggtcgctcaggctgaaatcgaactggcattccattcgccggaaacagtcggaagctggcatgcacgctggagtgaccgggtggcagagcatgacctggaaaccctgttctggcagtggggcgagcgttttccgtcactgaccgggatggaacgctggcagtggcaggatatgccattctggcaggtcatcgcagaggctggtatggcggcaagggaggccggtcatgccgtccgtgagatggagagatggatggtgccgaacaaactccgggaggcggcgtgatgcggcaacaatcacacagattacccgtaaacagcctgaatgagcgggttattttcaggaaaagtgagtgtggtcagcgtgcaggtatatgggctatgatgtgcctggcgcttgaggctttctgcctcatgacgtgaaggtggtttgttaccgtgttgtgtggcagaaagcagaaagccccgtagttaattttcattaacccacgaggcccactgtatgtctaaccaacaccagtatggcctcttaccgtgcaaattgcaaggaggagtaaaccatgaaactaccgggaaacgcccttatctggtgcgtattaatcgtgtgctgcacgttgttgatattcacactcctgacccggaatcgcctgtgcgaagtccggctgaaggacggatacagggaagttacggcaacaatggcttacgaatccggcggtaagtagcaacctggaggcgggcgcaggcccgccttttcagggctgatgctggtctgactgcactgaagcgcctttataaaggggctgctggttcgccggtggcccctttctccttgctggcattgtgcgggcatgaacaaccaggctgccaggaaggccgtttccctctgggaacggggatgaacgtgcgcctgcggcgcccgttcttttcctccgttttctctgtttatggccagttgtcagaaatgacattacctttcccgtgattattctctttttcttcctgctctgattctgactactgcagtgttgtcctgtctgccgggtcgggtagcagcggcacattgctgcgccgccgccccctaagaacggagcgtgcgagttttcccgcactccgctcaagcctttataagtg

SEQ ID NO: 283 - DNA, 13524 bp, Escherichia coli
  source 1..13524: mol_type = genomic DNA
gttggcactcaacgcagcaattgaggccgcgcgtgctggtgagcaggggcgtggttttgctgttgtcgccgatgaggttcgcagtcttgctgctcgcacacagcaatcgacaacggatattcaaagcatgatcagcgctctacaagagcgagcgcaatccgctgttacagtcatggagcaaagtagtcggcaagcgcacacgagtgtagctcacgcagaggaagcagctacagctcttgatggaattggccaacgcgttaacgaaattaccgacatgaacgcgcaaatagcgactgcggtcgagcagcagggagcagtaagtgaagacataaaccgcagtattatcaatatacgcgatgctgctgataccaatgtacagaccgggcagaataatttgcaaagtgcgaaatctgtcgctcagttaactagcgctctgagcgaactggcaaaacagttttgggaaaaacgaggataacgcttttcagtatctcgacagggataacttactttaccatcggttatcccttttagccgcacaaattttagccatggcttttcaggaagtcagggctatcagaatggccttagaaagcctagtcaaagagctgtcacgagaacaccgttagcttagcgtacgattttttccgaattctgcggttcccccaacttgatcgctttctggcgttccagctccttgtaaatctgcattgcttcaattagtaccggcctgccgttcatgaagggatcgcgcaaccttacacgctggccaactcgacccgtaataaagctgttttcctcttccaccagcacgataaaacccttttcctctttttctcgcaattcgcgcagcagctggagttccatatcgcggcggcgttcagggtagctggtccgctcagccattatcagctcattgttgatccatgcggcagtcattgacgccggtttgccgacgctcatcgaaacaacgcatattttcttatccatagcgccccttataaaaaagaaaagccaccagcggcggcttagcaatacaactgaaggtagcgcccggtactcagactgtgccgtccatggaatatttgaaaagggatccatccgtaccgggcatgtgatgattctgactgaagtcacttgtcagttgtcaattatttcagattaaaaataatatatttattagtgcatgatgtttgccatctcataggcgtcagccagcaactccatctctgacttgttcagcaaggtgaattctttcttgcctccaaccacaccatcggcatgaacagggaccagccaggggtatttttctcttacttcagccggtgctgcatgctggtggtgccatctacaaagtggcaattgctttttgtgacaaccaggcgcggtacgaccggagatatggtgcagagacacctcttcagatattactccatgcatatagcaggcaatgcaggggagagcgccaagagcattggctatgcgccgctcctccgccgtcggtgttcgtcccttcaagccacgagattttatttttaccgcgcttttccacgttttgctggctggtgggcgctctttctgtttagcgatacggcggtcgatagtattccgcattttctgatattgagattctcgccaggccggatcagccaacttctcccgttgccgagcgatcgctcgttctctggctgccttctgccacttacggtgctgttcaattttttgttcgattgttttcatatggcaaaaaaaaggcggcctgatggacgccaatgatgtcaaggagttaagtaatggcaacgtcttcgtagttgacaaaaactgcggctcaattatagcaatcaattagagcaatggtagatattttgtttatcgcgaatcacattttttcacttcagtacctgtgtgctatactccttcttgattgattggatgcggaatacaaacccgctcttttgtgcagcctggctccttgccaggctttttttatttcatcatggaagctgttaatgctttggaccttgctgaactgattgagagggctttgtcaacgtgccccaaaaattcgccaaactcagacatcactttagcaaaaccgcgccgtgcttcttcctcggtggcattcatcacgaaatgttcagcactacgcatacttctgacagggaacgcaacggatattgagtcaatatcaggcattctatcgctcagctttacagtgacaatgacggctggcgactgaatattagtgctcactgacagcactacatattttccgtcgatgttgaaattctttctcatatgtcgccataaatatcaaagaattagagcaatcatttacgcgttaatggctaatcgccatcttccagcaggcgcaccattgcccctgtttcactatccaggttacggatatagttcatgacaatatttacgttggtccagccaccagcttgcatgatctccggtattgaaactccggcgcgggccatatctcgcgcggctccgacacgggcactgtgtccagaccaggccaggtacctctggccagagtcatccttagctccgtaaatcaatcggtgagttgcttcaaaaatcccttccagggcgcgagttgatagctggctggtggatgatggcgaggcaacaccattttttctgacgcggcaaaacaggtagttattcggatcctcagctacaccagagacagaaatccatcgctcgaccagtttagttacccccaggctaagtgccttctctacacctgcggtgctaaccagcgttttcgttctgccaatatggattaacattctcccaccgtcagtacgtgagatatctttgaccctgatcctggcaatttcggctatacgtaacagggtgttataagcaatccccagaaatgccagattacgtatatcctggcagcgatcgctattttctatgagtgaacgaacctggtcgaaatcagtgcgttcgaacgccagtgcctgttttgcacgttcaccggcatcaacgttttcttttcggatccgccgcatgaccagtgaaacagcattgctgtcacttggtcgtggcagcccggaccgacgatgaagcatgtttagctggcccaaatgttgctggatagtttttactgccagaccgcgcgcctgaagatatagaagataatcgcgaacatcttcaggttctgcgggaaaccatttccggttattcaacttgcaccatgccgcccacgaccggcaaacggacagaagcattttccaggtatgctcagaaaacgcctggcgatccctgaacatgtccatcaggttcttgcgaacctcatcactcgttgcatcgaccggtaatgcaggcaaattttggtgtacggtcagtaaattggacatttaacactcagataatggttttaagtaaagtgtacaggatcggctctgcctttacctgtttatggttctcgtcatagaaacgccagcgaccgcgcgtgcgttctattttctcttcaccgcgcgataatgacagttgacaactatcacgatcaaacccttttgcccgccagtaaccacggtttttctcaagctcaatatgagtggacactttagcagctgaatatcccatttttcacctctgattgattggtggtgctaagtgcgctacgcgaaatctggagcactaacactgccaacatttcgcagattttacgtagcgcaaccttgatcaaatgatcaagtgatcactatttgacctgtaatgtattgaactgtatggatttacaggtaaattgatcatgttcaataacccttaagataacttcgtataatgtatgctatacgaagttattaggtctgaagaggagtttacttccagctgcgcataaaaatcaagaattattagggcaataaattttgagagaaaaatcccactccaccagccaaaaactggattgtttttcatagttgtttgacaattgctctaataaattatagttttgccgccgtttcgtaatacgactttggattcactatttaatgtgtcttcagcgttgtagagcggctcagaaggaaatgagcaaacagggaaaccttatacaacggcattacagctatgcattgctcatcttacacacagcgcaatgttgttagattaccccagcatggatcatgggtgaaacagtaggtcagagcttcaggctctgtgttgtcaatacagtgaggcataattatggctttcattccaccaaccatcgacgacgttagacattgctctaacgctttatctgtagaccctgccgaaaccgacgcagcccgagccattgctgaacactactcaaagttatccaatcaggagtaccgtatcacccaagacgacctggatgatctcactgacacaatcgaatatctcatagccactaactagccagacgctcaacaaatgcactaataaatctattatttttgttagatccttctataatggtggtcaacaattcccagtgtaatccgctgtgagttgttggccatgtcaattctggaggaggatcaatgataaattatgtctacggcgaacagctgtaccaggagttcgtcagcttcagggatctctttctaaaaaaagctgttgcacgcgcccaacacgttgatgccgccagcgacggtcgtcctgtacgcccggttgtcgttctgccgttcaaagaaacggacagcattcaggctgaaattgataaatggacattaatggcgcgggaactggagcagtacccagatctcaatatcccaaagactattttatatcctgtacctaacatccttcgcggtgtgcgtaaggttacgacttatcagacagaagcagtgaacagcgtcaatatgaccgctggccgcattattcatctgattgataaggacattcgcatccaaaaaagcgcggggatcaatgagcacagtgcgaaatacatagagaacctggaagcaacaaaagagctaatgaagcagtacccggaggatgaaaaattccgtatgcgcgtacacggctttagcgaaacaatgctgcgcgtccattacatttccagtagccctaactacaatgatggcaaatcagttagttaccatgtgccgctatgtggcgtgtttatctgcgatgaaactctccgagatggaatcatcatcaacggtgaatttgagaaagcaaaatttagcctttatgactctatagaaccgatcatctgcgaccgctggccgcaggcaaaaatatatcgcctggcagatattgaaaatgtaaaaaaacaaattgccatcactcgcgaagagaaaaaggtcaaatcagccgcatcagttacgcgcaggcgcaaaactaagaaggggcagtcagtaaacgacaaccccgaaagcgcgcaatagtttccatccggcatggttaatgagttattcattaagccatgccagagcttcatcaacctgcgcttcgtcttcgacgctaagcacttcatcttggggaacatagttcgccaacatagcgaaacaatatgtatcccaatggtccggtgagtgcaggttgaattttttcttcatatcttcctttgacatcaccttccattgacctgcggaatttatccctaccggtatctttgatgcttcctctatagtcgcagcccccttatcaagcctcatacgccctgattttacagcttctgccgcctgaatattcgcgaaagcgcgcatatcgaaataaaggcttttatcttcacggctgtgcatctttttaccccagcggatacgctggacggtaatgccatagcgttcgtacattagatcagccgtcgatttccccaagccatcgccatcaatagctatggttatgttcgggaagcgttctgggttacattctgcgaaaatcttggcggctaactgcgtttctgtaacgtctgtgtattccagcatacgatagttgattacacggcgtttatttcgctggccggacaccatcatgatattaataacggacttatctcgtcctgtgccaccagcaacgtcaacacatgcaacccagccccatcctttggcaatcttgacctttcgccgcgtcgcccgctcaacctcatcacgaccaagaagaaagccatcttgagatttgggaaattcaccacgtactttgatcatgtacatggggttatcacgaccgccatactccgcaagttttgctcgtataaattttgcatctacaagcggagattcttcactattcagtattatcgcagtaaacaatccatcaggatttcccgggcgaatagctagtctgtggtgtgaatcgtagaaatagcctgaaggtcgcgtaggctgggaaagnnnnnnnnnngcagaatacggttatccttaccggtcagcgcacctgttatcacactgaatgctttatcactcacacccgacgcttcgtcgatgatatacaagagatgatcggcgtgttcaccagccaacgcctcctcatttccggggcgacaggactttatcaatattgtccaaacacccttgccagtcacctcaaaaaaagacgtttctgtaagaatgaaatacttcgacaaccacgggaatctgctaacagcagtagcccaattgctctttatgtatttgaaaataccatcaaggacttgctgtcttttgttagcgaccagaatgacgcgagcgccggggaaaaacatgatgaagagtattgcaatgatactcgtcatatccgatttaccagtaccatggccggaggtcacacttgtccaactgccgtcctgctgcgtggactcaatgatctcatcctgctgccaggttggtgtcttcccaaacaacacatcagcggccgcaatccagtcataacgatatagtgccaccagctcgcgccaacgtgggtccgttacgcaacttctggccattaatcatcatccccgtacagtttgcgggtaacttcttcgtcttcctcctcgtcttcgtccagatcctgttcaagccatgcttcgtttgatatgccttccgcatcgacatcaccataaccacctgtatcgacgatatcggcaatttcttctctacgctgctcaatccacaatgccgcatcagcgcggcggctggcggcccgttctcgcgcgattttatccagatcttcaagtgatggagcgccagatgctgtttggttttcctcatcatcggtattggtcttaggagcacgcagatcggctttgatttgctccagcatcaggggcggcacttttcctccatgcgcctcgatgaattcagccgcttccagcactgaccagttattttcacgctttcgttcgtatgccagcttaacaatgccagcttgccccatagataaagcgtgcttttccgcctcccggctttcttttcgatagttattccggatgctgtaaatggtgttgatcaggctgcttatctgcgcggaacagctgtttagcatgctcgcgatacggtattcaggcggagtaccttcatcatcgtctttttgctgatcgcgcatttcctgcaccaagcgaatacacgtatccctggcgttctccagcataaggagatgagaaagagacttttccagaagagtggtttccagaacatcggccccggaccgacgcaacatagcgcgcgcggccttccgcgcttcaacgttatctatcaggtaatcgccagcttcgaattcaaagcgttcaccatcatcatccagggtgtcgcgttccaggcgatcacgtaaggtccggtgggcgcgggtgatcacgtcatgatcatctgaacgatcatttatgcgcttattttggcgcttcgcattctcgactgcggcactgacaacggcattaactctctgtttttccgctatttcagccgcaatatgatcacctgcatgttgatcattagagtgatcaatgatcatgctttttagtggcttcctgactggcttatttggcttgcggctgtccgcagtcctggtgtcttctttgaaggcacggagataacgacgtgcggtattagggttaagattaaactcggcggcatattgtgcgatggtgtaaccaccatctcgcgccaggcgagcaaaattcttcttgtgatcgtcccaggtcacttatgcttcctttcgtataaaactctttttgacgcgagggtaacgaaagtcacatgtcaaaaggcccggaacgggcaagcaatcaatcagatacgtgcggatgtggcattaccgtaatgacggtgctgacggaccaccttattgaaaagttgacgcgccatcacccaaggctggtgctcccggcgttccttttcgtcctgcgtcatatagagttcgttctggagtttttcatcaaaccggcgcggagcgcggctgcggcgaaagaattcaggattcagagagtggatctgaaatctacgtgggcgtgtactgtcatcaatcaaaacagacgaatacttagacacagcgatagcctttaagcgcagataaacatcgcgcttatcgacatccagatgcgggtattccttttcaagaattgctgcgagttctttcgctgatagaagagatttagtgcggatcatgtaatccgcaatctcgtacgatgttattcgtgagtgatttatttccatgaagtggcgtccctgccagttaagtaacatcctgtcacctactgattagcccatgtcaactaatcaacgtcgaatataataccctcgattaaagaaatagcaatacattagagcaatattatctaacgctcgacgaatgacttgtgatagcgccgactccaagcgcgtaatcaaagaacaatcgttgatgcatcgccagcctaccgtgcgtcttctcccaattatcgcggtcacgctcaatatcacgctggcatgactggcacagaggaatagcataaatgtcatgcgcgcataatcgactatgacgaacgatataaggcgtaatgtgagcgccagctcccgcagctccacagccacagcatggacgggaagccacaaagtccatgtactcgggcaattttagcgattgaagttttggtattttgaaatgcgccatacctgggtcggagtcaacatccacagggcatacttttgcacgcatcggcgcggcgcgttcttccatcatctgaacatatgctgtagcgcgatcgtcatacgggcgaatatccgcctctttcagaggtccgctatcctgcggagtagccttcatcttatttattgatatgcggcagacttcttccggcatcaggtgcatcatgttgcgcatgaaagcccaccagcacagctcctgaatacttaaatcatggctatttgaaaggcccatttcctgacgggcgacatccagtatccagttaacgcgattattgtgcagcgtttctttcagctcattaaaaccacgcatccggtaatggttatcgtgatgccagcacaacaacaccgcgctattgtctcgttcagcgtggacaatatggttgtcacaccaactacgatctgcggcctggcattgaccctctttcctacgcaaccacgccaccagcgcgtcaattccaccaatacggcgaaacagttcatcgctgttaaaaaacggctgcaacgcctcatttgttgccatggtttgctcggtaacaacgaggccgtcttccatgtgctcgattaactcacgcggcaccggctccataataaatttacggccagcctccaccagctttctgacctcctgatccactttgaacgtggcgaggccaagctctttttgtacaaagggagtaattacggctttcacatcacacctttaatcactgattgggctttatctgctgcccggcattctctgtttaagcacaaccatttcctgacggcataacacagcaatagcggtcctggcaccaatttgcttaccaaccaggtattgctttacctcgcggcgactcacgccatcaagaagcatctttaacgcttcacgggacaatttgttgtatttacgtgccattaatctactccgcggaaccatacaatctacgtaacgtgtcggcgacagaagatacagatatctctccggtcgcagcccctacggtaaggtctgccagttcaggtgaatcaaatacctgcaccccgttacggcgtagaaataacagcgcactgtttagcgcggtacgcttattggcatcattgaatatatgccctctcgctgtagccaccaggtaggtggcggagacttcgaaaaggtcggtgatctcttcgtaggcaactctggcctgaactctcccgataatggcctctgccctacccggatctgacattcccggcaggccgccgtagcggtttatattcgcatcatgaagcgcaataagttcttccggtgatatatgcctcattatcggttaaccagttccttgttggtggagtccagggtgtcaaacagggatgcaaattcagcatccagcgccgcttttttgtaggcttcgaaagtagccttgctgacaattactgctggcttacggcctctgcgggtgatttcaacctcttccccggcttcaacattgttgagcacttcagaaaggttgccgcgcgcggtacggaagttaatggattgcataaacacctcgtgtactcgttatgtgtacacaattataaacttcacaggcataaagcaccagcactttgcagcttaaatcaccggacaatcatcaaattccccacttcgggcatcattaatgacatgagtgatcacaccaaacacagcattactccccgtgcatccatcgtcatccactggtaacgcctctttcttcccggtgcttaaatcctccaggtgctggcgcggatactttcggtatctctttatgcgatattcaccctccatagcgcagacaagcagcgaaccatcaaccggagtaagcgaggaatcaaccaccagcaaagcaccctgcaatattccctcacggtgatggctgtctgccgcccgcatgaagtaggtcgctgatggatgcctgattagttgctgatcaagagaaattcggctttcaacataatccgccgcaggagaagggaagtccatagcgtttccacctcagagtactgtttatccatacagtatacattaaagatgcttgaagtgtgcaatagcgcgatgctttgcgctcgcctggtggcgcgttattttttggctatatcttctttctgatataccggatcgtttccttttggcagcaggaggcttaactgccggtagtgccgtagccgttccatgaaataggtgcgcaggttctcaggttgctcacgggctacctgttccgctatgacgggtatgttcaatcgctctttgtaggcaacccccctggcagccaggtcaacgttaactttattcctttcttcctggcttttagctgctatgttccagttgctcatgtttaaggctcacatttccagatggtattctgaacacccgaaccgggcgtaagatgagggttagcgttcgcactatgctgatatacagctttggactttccatattgctgacaggctttttctgcggttttttgcaggctatccagcccataccagccatcagactggatgcttaccttttcaccgtcattgtattgcaccatcgcgcacccaaacatagctatcatcgcaccgacaataccgcttttccaaaaagctctaattaggtcattcgttgcctaatgtccgaactgctaaagcatccaagttgctgtagaatcaccgccaattacataagcctgaaataagtggatgaaaatgacaagtattcaacaacgtgcagagcttcatcgtcaaatctggcaaattgctaacgatgtcaggggttcggtcgatggatgggattttaagcaatacgttctgggcgcacttttctaccgttttatcagcgaaaatttttccagctatattgaagccggtgatgacagtatctgttatgcgaaactggatgacagcgtaattactgatgacattaaagacgatgccatcaaaaccaaaggttacttcatctacccaagccagcttttctgcaacgtagctgcgaaagcaaataccaatgacagattgaatgcagatttaaacagtatcttcgttgctatcgaaagttctgcttacggttatccttcagaagctgacatcaaaggtttgtttgctgatttcgataccaccagtaaccgcctgggtaacaccgttaaagataaaaatgcccgcctggctgcggttctgaaaggggttgaagggttaaaacttggtgacttcaacgaacatcagattgacctgttcggtgatgcctatgagttcctgatttctaactatgcggcaaatgccggtaagtcaggcggtgagttctttacaccgcagcacgtctccaagctgattgcacaactggctatgcacgggcagaccagcgttaacaaaatctacgacccggcagcgggttccggttcgctgttgttgcaggctaaaaaacagtttgatgaccatatcatcgaagaaggcttttttggtcaggagatcaaccatacgacctataacctggcgcgtatgaacatgtttttgcacaacatcaactacgacaagtttgatatcaagctgggtaatacactgactgagccgcacttcagagatgaaaaaccgtttgatgccatcgtttctaacccgccgtattcggtgaaatggattggcagcgatgacccgacgctgattaacgatgaacgttttgccccggctggcgttctggcccccaaatcaaaagctgacttcgcctttgtactacatgcgctgaactatctttctgccaaaggtcgcgccgcgattgtctgcttcccgggtattttttaccgtggcggcgcggagcagaaaatccgtcagtatctggtcgataataactatgtcgaaaccgtgatttcactggcaccgaacctgttctttggcaccaccattgccgtcaatattctggtgctgtctaaacataaaacggataccaaagttcagtttattgacgccagcgaactgttcaaaaaagagactaacaacaatatcctgaccgacgcccatatcgaacagattatgcaggtatttgccagcaaggaagatgttgctcatctggcgaaatctgtcgcgtttgaagccgttgtagcgaatgactataacctgtcggtgagcagttatgtggaagtgaaagataaccgcgaaattatcgatattgctgagctgaatgcggaactgaaaaccacggtcagcaaaatcaaccagttgcgtaaagatattgatgcgattgtggctgaaattgagggctgtgaggtgcagaaatgagcgagttaagttatctggaaaaattgctggatggggttgaagttaagtggttgccattggggaacgtcgctgaaatttatggtggcctaacaggaaagagtaaatctgattttgagaacggtaatgccagatatgtttcatacaaaaaaatatttggttatttagatgtgaatgattaccctactgattatgtatatattagtgagggagaaagacaaaataa

SEQ ID NO: 284 - DNA, 13508 bp, Escherichia coli
  source 1..13508: mol_type = genomic DNA
tggtgtgggtttccttattcacatgtacgcctcctggtacatgcgcggtgaagagggctactctcgcttcttcgcctacaccaacctgttcatcgccagcatggtagttctggtgcttgccgacaacctgctgctgatgtacctcggctgggaaggcgtgggcctgtgctcctatctgctgatcggtttctattacaccgatccgaagaatggcgcagcggcaatgaaagcgttcgtcgtgacccgtgtgggtgacgtgttcctcgctttcgcactgttcattctttacaacgaactgggcaccctgaacttccgcgaaatggtggaactggcaccagcgcactttgctgacggcaataacatgctgatgtgggcgacgctgatgctgctgggcggtgcggtcggtaaatctgcgcagttgccgttgcagacatggcttgccgatgcgatggctggcccgacgcctgtctccgcgctgatccacgctgcaacgatggtaaccgcgggtgtctacctgatcgcccgtacccacggcctgttcctgatgaccccggaagttctgcatctggtgggtattgtcggggcggttacgctgctgctggccggttttgccgcgctggtacagacagacatcaaacgtgttctcgcttactctaccatgagccagattggctacatgttcctcgcgcttggcgtgcaggcatgggatgcggcgattttccacttgatgactcacgcgttctttaaagcgctgctgttcctggcatccggttccgtcattctggcctgccatcacgaacagaacatcttcaagatgggcggtctgcgtaaatctattccgctggtttatctctgcttcctggtaggcggcgcagcactgtcggcgctgccgctggtcactgctggcttcttcagtaaggatgagatcctcgcgggtgcgatggcgaatggtcatatcaatctgatggtggcaggtctggtcggtgcgtttatgacttcgctctacaccttccgtatgattttcatcgtcttccacggaaaagaacaaattcacgctcacgccgtgaaaggggtaactcacagcctgccgctgattgtgctgctgatcctttccaccttcgttggcgcactgattgtaccgccgctgcagggcgtgcttccgcaaacgacggagctggcgcacggcagcatgttgaccctggaaattacctctggcgtggtcgcggtggtcggcattctgctggcagcctggctgtggctgggtaaacgtactctggtgacctccattgccaacagtgcgccgggccgtctgctgggcacctggtggtacaacgcctggggctttgactggctgtacgacaaagtgttcgtcaaaccgttcctgggtattgcctggttgctgaaacgcgatccgctgaactcaatgatgaacatcccggcggttctttcccgctttgcaggtaaaggtctgctgttaagcgagaacggttatctgcgctggtatgtggcatccatgagcatcggtgcggtcgtggtgctggcactgttgatggtactgcgttgagttaaggattgtgggattgcccctgggcatataagaacgtaggtcggataagccgccttcgcggtgcatccgacactacccccagtccgaagagaattttctgtcgtgagaattcgttgaaaatccggtcctgacgggacttttacaaggaataaagatcgccatgttactaccctggctaatattaattccctttattggcggcttcctgtgctggcagaccgaacgctttggcgtcaaggtgccacgctggatcgcgctgatcaccatgggattgacgctggcgctgtcgctgcaactgtggttgcagggcggttattcactgacgcaatccgccggaattccgcagtggcagtctgaattcgacatgccgtggatcccgcgttttggtatctctattcatctcgccattgacgggctgtcgctgctgatggtcgtgctgaccggtctgctcggtgtgctggcggtactatgttcgtggaaagagatcgaaaaatatcagggcttcttccacctcaacctgatgtggatcctgggcggcgttatcggcgtgttccttgccatcgacatgttcctgttcttcttcttctgggaaatgatgctggtgccgatgtacttcctgatcgcactgtgggggcataaagcctctgacggtaaaacgcgtatcacggcggcaaccaagttcttcatttacacccaggcgagtggcctggtgatgttgattgccatcctggcgctggtttttgttcactacaatgcgaccggcgtctggaccttcaactatgaagagctgctgaatacgccaatgtccagtggtgtggaatacctgttaatgctgggcttcttcatcgccttcgcagtcaaaatgccggtggttccgctgcatggctggctaccggatgcgcactctcaggctccgaccgccggttccgttgacctcgcggggatcttgctgaaaactgccgcttacggtttgctgcgtttctccctgccgctgttcccgaacgcatcggcagagtttgcgccaatcgctatgtggctgggggttatcggcatcttctacggtgcgtggatggctttcgcccagaccgatatcaaacgtctgatcgcctacacctcggtttcccacatgggcttcgtgctgattgctatctacaccggcagccagttggcctaccagggcgcggtaatccagatgattgcgcacggcttgtcggcggcgggtctgtttattctttgtggtcagctttatgaacgtatccatacccgcgacatgcgcatgatgggcggtctgtggagcaagatgaaatggctgccagcactgtcgctgttctttgcggtggcaacgcttgggatgcctggcaccggtaacttcgtcggcgaatttatgattctgttcggcagcttccaggttgtcccggtgattaccgttatctctacctttgggctggtctttgcatctgtttattcgctggcgatgttgcatcgcgcttacttcggtaaagcgaaaagccagattgccagccaggaactgccagggatgtcgctgcgtgagctgtttatgatcctgttgctggtggtgctgctggtactgctgggcttctatccgcagccgattctggatacctcgcactccgcgattggcaatatccagcagtggtttgttaattccgttactactacaaggccgtaaatcgccatgacaataactccacaaaacctgatcgcactgctaccgttgctgatcgtcggcttgacggtggtggttgtgatgctctccattgcgtggcgacgcaatcatttcctcaacgctacgctctcggttattgggcttaacgcggcgctggtttcgctctggtttgtcggccaggcgggcgctatggacgttacgccgctgatgcgcgttgatggtttcgccatgctttacaccgggctggtattgttggcgagcctcgccacctgtactttcgcctacccgtggcttgaaggctataacgacaacaaggatgagttctacctgttggtgttaattgccgcgctgggcgggatcctgctggcgaatgccaaccatctggcgtctttgttcctcggtattgaactgatctctttgccgctgtttggcctggtcggttacgctttccgccagaaacgttcgctggaagccagtatcaaatacaccatcctttctgccgcagcgtcttctttcctgctgtttggtatggcgctggtgtatgcacagtctggcgacctgtcgtttgtcgcgctgggtaaaaacctcggcgacggtatgctcaacgagccgctgttgctggcaggtttcggactgatgattgttggcctcggcttcaaactctcgctggtgccgttccacctgtggacgccagacgtataccagggcgcgcctgcgccggtttccactttcctggcgacggcgagcaaaatcgctatcttcggtgtggtgatgcgtctgttcctctacgtaccggtgggtgacagcgaagcgattcgcgtagtactggcgattatcgcctttgcctccatcatcttcggtaacctgatggcgctgagccagaccaacatcaaacgtctgctcggttactcatctatctctcacctcggctatctgctggtggcgctgattgcgctgcaaactggtgagatgtcgatggaagcggtaggggtttacctggccggttatctgttcagcagcctcggcgcgttcggcgtggtcagcctgatgtccagcccgtatcgtggcccggatgctgattccctgttctcttaccgcggtctgttctggcatcgtccgatcctcgcggcagtgatgacggtgatgatgctgtctctggccggtatcccgatgacgctgggctttatcggtaagttctacgtgctggcggtcggtgtccaggcacacttgtggtggctggtgggtgccgtggttgtcggttcggcaatcggcctctactactacctgcgcgtggcggtgagcctgtatcttcacgccccggaacaaccgggtcgcgatgcaccatcaaactggcagtacagcgcgggcggtatagtggtgctgatttctgcactgttggtactggtgctgggtgtatggccacaaccgctgattagcattgtgcggttagcaatgccgctgatgtaatctgttagtttgtaagtcagaaagccgccgacatgctcggcggttttttttggcgctctgacaccatcacccaacaataaccgtcagcgcatgattcccttgtcgcagcatacgtcgatacgcgctaatcagcttttccatatcaagcatgatcgaggcaaagagttgcccctctaactcttctgaaaaggtcactcccggataaatctccatttcattgagtcgcttaatggaaaactgtttacgcagctcacttcgatccagtgattccagtcggtcgattgtcgcggctaactcctgattccaggtcaatcccaggaagccatctatgccatcttcgaggctgtgttcaccaagcacggcacgactcagcggatcattcttggcgggatcaaaagcagaggtgcctgtcagcccaaagtgtaaaaaatcccagcgtttatcaatatccagtcggcgtaatcctgaaagcgtgtcatgtatattatccatcaaaggtttttcagtagactcaagcagttggttaatcttttctgagtcaatttctgcaaaataaccaatcattcccatttatttttccttcattgaatttcatgtttcgcatcttaaaacagacgagggaaaataaaatgtgcatgtcgctttttctggacccgcctcgagaaatttttattatttactgttgtataacaaatttataacaccatccaccacctgagccattttctgataattcaatctgtctgcggtatcaccgggcaagtggtattgtttattacgataaaaagcggtgtcagtaatcattacggcgggaatatcgtgttgccaataattaaggtgatcagagaaatcaataccgggaataaaccctggggcattcatagaataaacagataaataccgggatgataacaatgtcgcttttacctgacgaacggcgttgatatcctgcattctgccgaccacggcaataaagtctccccgatcgggataaagccaggacattgccgggtaagggtaatcctggctaccaggcgcagagtcgtaatagccaatcatctccagtgctatcattaattttactggacgctcaagcgaagctgcatgtaccgcgctccccatttcatcgctacgaaagaagggcggttcttccgacgcataggcgaccagctgcacgcctgttttcggtacttgctgatgtaacaaacgtgccagttcgagtaatcctgccacgccgctggcgttatcatccgcgccaggtgtataggtcaattcatcgttttcataactgctggcagagtcatagtgcgcaccaataataatcagcggtccatcggcaggaccataatcagcaacaatgtttttgtaggggccacccgtaatggggacgtcctgcgaggtaattctggcaccgctactgacgaagacctcttttatatactctgcggacctattcagattatcaatatagtcggcactacgtggatgcacagtttgtgtaagataacgaactgttttttctaattgctcaggatttgcgtgtcggggcattggcggtaatgcattgacccagggttggtaaaaaataataagagggagtgaaaacagaaataatataataaaagcaaaatttatttttttcatatgcaaattattaatgggtttcgttattgaatcattatttgttatgggtttcgatattgcatcttattaagattagcaggattatacaaagagtatattttatgtctggtgcctgtatttatttaaaaggattttatatgcgaaataaaaatataatcatgttgcttatgagtagtttgattttgtcaggatgcgggccggaatctgagaataaggaaagtcagcaacaacagcccagtacccccacagaccagcaagtgcttgccgcgcaacaagctgcaataaaagaggccgagcaaagatccgtcgccgataaagccactgcagacgcgaaagcaaaagccttagcccagcaagaagcgcaacaatattcagacaaacaggctttgcaggggtgcttacaggcggctccaaaatatcaacatgcagccagagaaaaagcagcgtcccaaatcgcaaatccaggaaccgctcgctacaagcagttcgatgataatccggttaagcaggtagcgcaaaacccgttggcgacgtttagccttgacgtcgacaccggcagttatgcgaatgtacgccgttttctcaatcatgggctgttacctccgccagacgctgtgcgggtggaggagatagtcaattatttcccgtatgactgggatatcaaagacaaacaatctattccggccactaagccaatacctttcgctatgcgctacgaactggcacctgcgccgtggaatgaacagctaacattgctgaaaattgatatcctggcgaaagatcataaaagtgaagagttaccagcttctaatctggtctttcttatcgacacttctggttcaatgatttctgatgaacgtttgccacttatccagtcttcgttgaaattattggtcaaagaacttcgtgagcaggataacattgccatcgtgacctacgctggcgactcccgtattgcgttgccttctatctccggtagtcacaaggcggaaattaatgccgcaattgattcgctggatgccgaaggcagtaccaatggcggtgccgggctggaactggcttatcagcaggcggcgaaggggtttattaagggcggcatcaatcgcattttattagccactgacggtgactttaacgttggcattgacgatccaaaatcgattgaatcaatggtcaaaaaacagcgggagtctggtgttactctgtcgacgtttggcgtggggaatagcaattacaacgaggcaatgatggtgcgaattgccgatgttggtaacggcaactacagctacattgataccctctctgaagcgcagaaagtattgaatagtgaaatgcggcagacgttgattaccgtagcaaaagatgtcaaagcgcaaattgagtttaaccccgcgtgggtaacggaataccgtcagattggttatgaaaagcgccaacttcgggcggaagattttaataacgacaacgttgatgcgggggatattggcgcaggcaaacatataacgttgttattcgaattaacgctgaacgggcaaaaagcatcaattgataagttacgctatgccccggataacaaatcagtgaaatcggacaaaacgaaagaactggcctggttaaagattcgctggaaatacccgcagggaaaagaaagtcagttagttgaattcccgctggggccaacaataaacgccccctctgaagatatgcgtttttgcgcagcagtagctgcatatgggcaaaagttacgcggttctgaatacctgaacaatacctcctggcagcagatcaaacagtgggctcagcaggcaaaaggggaagatccacagggttacagggcggaatttattcgcctgattgaactggcggatggtgtgactgacatcagtcagtgatgactgtttagcaaactatgttcgaccagtcagcatatttgctgactggtcgaattgattaacaatgatgttaactcactcttttgccggatgctctatttttgggttgtgagtgttttatttctaattgtgtataagaagcattgattcgtgcatcgccatatttatctaaataacaatttctgtttaccagtcgatgttgaaaatcaatttcgtactgctcttctgctgaatattttttaaatctgtcagcatagttttttaataacgtatagggggcgctgtcagaattgctttccctttgttcaatcacttcctgggctgccatgcacacaaacgcaccgcaactttggcttaagtattgctgaagatcggcatgtaaaaatattatctctggttcatttaaatgaacttttatattattattcgacatttctcccatgagttcagaattaaaactattaatgacacgcttaagtgaattttctttatcatggcctagtgcacgcaatgagttgaatatgacgcattttatttgtagtttattatttttttatttactattttctgtagcgaaactaatatccagtgtccgccagtatttatgtggaataactggacttcattcggccatgatggatcgctcttaatattttcattgagagcgtcttccaggtgagttctggtggagtaggggacgtagagaccagtaggataattgacttgagtattttttgcattagcggcgatcttctgaagatagcaagctatttcatctgtggttaattgacgatttttatcccagaagtttgtatcatcactcagttcattattctcatcatttaaaagcacctttgaaagcgactgtttttcagatataagaggaatttcatcaccgataattgtcattaatttcgaaggggagaatagctttttgaacaggagaacatctgaattatccggaccagttggtttaaggtgggagttggttgcggtatgtgccaaattatataattttaaacaggcatttttaataagtcggataatcgatagggtctcatttgttgggtttctaacaatatggtaaagaatatcttcagctttttttccaaattcatcataacctaacgcaatattatgcagtaactcaatactttcttcatctccggataacgctgttttttttaaatactgcagtaattcctcggtcacagtaaatttttctgcaaatgtctgactgagttgggtttgagataattgacaataattgctgacaactgtaaccatcatgggctccttttagttgcaaaggttgtgctgaatgaagataaaaagaggcaacttattgctctgaatatagtgcgtaaggagatgaataaatatcaaaaatcgctcaatatgcccgtgtgggtggatatatgtagcgcgggttgcgataacagggcaagtttcgccctgtttttaataataagcagagttaaacgttaaacacggtgaaatcattcgctagttcagtcgccgggaaaattgacctgcattcacgtaacaggtgctgacaacctttgtcatcatagcgcgagctgacgtgggtaatgattagcttaccgactccagcctcacgggctagtgtcgcagcctggcgtgtagagctatggccgcgactattggctttggcttccatggttatatccagcgtcgcttcgtgcaccatgacatcgacacctttagccaggtcaagtgcggcatcgcaggggccggtatcgccgaaaatagcgagcgctttacctggcactggagcagctaagtaatctgcgccgttaatctgccttccatcttccagcgtgattgttttgcccgcttttaattcctgaaacagtgggccaggcggcacgccagcagcttttaatgcctgggcatttaatgcacccggtttatcatgttcttcaatacgatagccataacattccagtgggtgttccagcggataagcggttactttgcgcaggccatcatcgagaatttcgccagcgccaatttcgacaatttccagcggataatcggtccatgagccgctaatccgcagcgcggtttccacaaattcacggataccttgcggaccataaatcgttaagggttggataatgcctgacatagaacgactgcacagcaagccgggtaaaccaaaaagatgatcgccatgaaggtgactgataaaaatcttgtccagttttccagggttaaaggcggtatgcagtagctgatgctgggtgccttcaccgcagtcaaacaaccaaagaccgctctgggtcggatgttgcaggttaagcaatattgccgtgacattgcgcgtgcgggttggcacaccggccgaagtacctaaaaaaattaattccatgagttcatcacgtttcaaaaaatattccggctagtataaggcatacatctaaaaggagagcattatgattgaatggcaagatctgcatcactctgaattatcggtttcccagctttatgccttattacaactgcgttgcgcggtgtttgttgtcgagcagaattgcccttatcaggatatcgatggtgatgatttgacgggggataatcgccatattctcggttggaaaaatgatgaactggtggcatatgcgaggattctgaaaagtgatgatgatcttgagccggtcgttataggtcgggtgattgtcagtgaagcgttgcgtggcgaaaaagtggggcagcagctgatgagtaaaacactcgaaacatgtacgcatcactggcctgataagcctgtttacctcggggcgcaggcgcatctgcaaaacttctaccagagtttcggttttatccctgtgacggaggtctatgaagaagatggtatcccacacattgggatggcacgcgaggtaattcaggcgtaatcaacaacccttgtctatagttagtgacaggttttacgcaaatggagaacgagaatgtctaatcagtttggtgatacacgtatcgatgacgacctgacgctgcttagtgaaacactggaagaggtgctccgctcctctggcgataccgccgatcagaaatatgttgagctgaaagcgcgtgcagaaaaagcgctggatgatgtgaaaaaacgggttagccaggcttcagacagttattactatcgggcgaagcaggcagtttatcgtgctgatgactacgtccacgaaaaaccctggcaaggaattggtgtgggcgcggccgttgggctggtactaggactgttgctggcacgccgttaaaacctccctacaccggggtactgcattttttttgtagtaccccgtataatgtgaggcttttaacagggagaggtccgcgtgcaatcacttactacggcgctggaaaatctactgcgccatttgtcgcaagagattccggcgacacccggcattcgggttatcgatattcctttccctctcaaagacgcttttgatgccttgagcttgctggccagtcagcaaacgtacccgcaattctactggcaacaacgtaatggtgatgaagaagctgccgtcctgggcgcgattacccgttttacgtcgttggaccaggcacaacgttttcttcgccagcacccggaacacgccgacttacgcatttgggggctgaatgcttttgacccgtcgcagggcaatttacttttaccccgcctggaatggcgacgctgtggcggtaaagccacgctgcggctgacgctattcagcgaaagctcccttcagcacgatgcgattcaggcaaaagaatttatcgccacactggtgagtatcaagcccttgcctgggttacatttaaccaccacgcgagaacaacactggccggacaaaacgggctggacgcaattaatcgaactggcaacgaaaaccatcgccgaaggtgagctcgacaaagtggtgctcgctcgggcaactgacctgcatttcgcaagtccggtcaacgcggcggcgatgatggctgccagtcgtcgactgaatctgaattgctaccatttttacatggcctttgatggcgaaaatgcttttcttggctcttcaccggaacggttatggcggcggcgtgacaaagcgctgcgtactgaagcgctggcgggaacagtagcaaataatcctgatgataagcaggcgcagcagttaggagagtggctgatggcggatgataaaaaccagcgcgagaacatgctggtggtggaagatatctgccaacgattacaggccgatacccagacgctggatgttttaccgccgcaggtactgcgtctgcgtaaagtgcagcatcttcgccgctgtatctggacttcactcaacaaagcggatgatgtgatctgtttacatcagttgcagccaacggcagcagttgctggcttaccgcgcgatctggcgcgacagtttatcgcccgtcacgaaccgttcacccgagaatggtacgccggttctgcgggctatctctcattacaacaaagcgaattctgcgtttccctgcgctcagcaaaaattagcggcaatgtcgtgcgattatatgctggcgcgggcattgtccgtggttccgaccccgagcaagagtggcaggaaatcgacaacaaagcggcagggctgcgtactttattacaaatggaatagtaatgagtcgcatcattaccgattcatatcaataatctatttttgtagctccttatacttagccgcaatattgataccggacaaactcatgtcagtaagcgcatttaaccgacgctgggcggcggtcattctggaagcattaacgcgtcacggcgtcagacacatctgtatcgccccaggctcgcgttctacaccgttaacgttagcggcggcggagaattccgcattcattcaccacacccatttcgatgagcgtgggttggggcatctggcgctggggctggcgaaagtcagcaagcagccggtggcggtgattgtgacctccggcacggcggtggcaaatctctatccggcactgattgaagccgggttaaccggagaaaaactgattctcttaaccgccgatcgcccgccggagctaattgactgcggcgcgaatcaggcaattcgccagccgggaatgttcgcctctcaccccacgcacagtatttcattgccgcgcccgacccaggatatccccgcacgttggctggtttctaccatcgaccacgctctcggtacgcttcatgcggggggagtccatatcaactgcccgt

SEQ ID NO: 285 - DNA, 13470 bp, Escherichia coli
  source 1..13470: mol_type = genomic DNA
gatttatccaattcgaattttgcaggttgcagactacaaaacgctattttccaggactgtaatatgtataaaacgaatttttattacgccataatggaaaaaatactttttgataattgtattctcgatgactcaaatttcgctcagataaaaatggccgacggaactctaaatgcatgctccgctatgcatgttcaattctacaatgcagcaatgaatagagccaatattaaaaatacctttcttgactattcaaatttttatatagcgtacatggctgaggtaaatctttataaagtaatagcgccatatgttaatttatttaaagccgaccttagtttctctaaactcgatttaattaactttgaacatgctgatctgtctcgcgtcaatctgaacaaagcaatcctccagaatataaacttaattgatagcaaactcttttgtacgtggctaacaaatacattcctcgaaatggttatatgtaccgactctaatatggctaatgttaattttaataatgccaatttaagcaactgccatttcaactgttctattttaacaaaagcctgtatgtttaatacccgtctctatcgggttaattttgatgaggctagcgtccagggaatgggcatttccatactccgtggggaggaaaatatccccattgatagtgataccctggtaacacgacagaaattctttgaagaagattgtacctctcatactggcatgtcacaaactgaggataatattaatgcagtcgctatgaagattactgcagatattatgcaacacgcagattgaggttaaatcgaagaacagccaatgaattgactttacaagagagataacttatttgttttagaatcatgaatgttagcccgagctaacctgttaaaggtgcaaaagattgcacctttttcagattacctcgggcctggttacgtcgctttcggcttactgattttcctcaattagcaacgcttcaagcaaatcgagatcgtgcagtaatttttgcagcgtttcgttgctgatctcccgcgtggcgcgcaggtggtacagttcagcacgttcagaacgcaatgccgccagacggaagcgacgctcaaggttctcttcctgcacggaactttcaacgtcgttacgtccatcggcgcgacgacgcaggttaccaatgacgcgagaactgacctccgtaagcagctggttatcgatattctcttcggtatccgccgccagacgctcctccattttctggatcgccacaatcgccacttctgccgttgccgctcgcgcaatacgttcttctttcaattgttgcgaatggtccgcgacttcaatgtgttgtagcagaataggcaacatcaccacgccgacaaacagcgagaagagaatgacgccagccgccaggaacaccagctcatagcgcgccgggaagacgttaccatccggcaagagcagcgggatagagagcacaccggccagagtgatcgccccacgcaccccggcgaaagacgcgatcaggatttctcgtgtggtccacgaaccaaactccatcggcttcttcttcaggaagcggttgctgaactttttcatcgtccacagccagccgaaacggaccagcatcagcgccgcatatatcagaataatatcggtaaacagcatccagatttcgacgttagggtcgatttctgccgccatcagcgacgtctccagaatacctggcagctgcagacctaacagcaggaacaccatgccgttaaagacaaattccagcatcgcccaggtgctgtttgcgcgcaggcgcattgccagtggcgcacggcgcatcacaccggagcgggtgatggtcatcccggcggcaaccgcagcgaggatgccggaaacgccaatatgttcggcaatcaaataagaagcgaatggcagcaggaacagcaggacgatctgcgtcgcgggttcatcaccgccccagcggctgaggaatcgcagcgagcgaccatacagccagctcaccacaaaaccggcaagaataccaccaatggctactttcataaattcgaccgtcgcaccgccgacggtgaagatcatcgtccccatcgccactgccacggcaaacttcaacgacaccaggccggaagcgtcattcatcaacgcttcgccctgcaaaatgcccatgatttttttcgggatgcgcccttcgccaacaatcccggagagcgccacagcatcggtcggagaaagtaccgccgccagcgcaaaggcggggatcagcggaatgcccggcaccacccagtaaataaggaagccaatgccgaccacggtgaccaccaccagcgccagcgcgaggccgaaaatctctcgaccatgttcgagaaattcacgggtcggcgttttccagccatcagcgaacagcaacggcgggataaacaagactaaaaagagttcaggatcaaactccacatgcaaaccaaacgtcggccacgccagtagcgcaccgatggcgatttgcataagcggaagcgggatctgaaagggcatgacacgagtgaccaccccggacagcgagaccacgagggtcattatcagtatggtgaagaagatttccatgcgttccctgtttgcgatgttttttatgatctgagaaagacgttatgcctgaattctcattttttcagaatatcgcaaaagctcacacaatgtgcggagaaaataaaaacgggcagccattgccacccgttttcagaatccgatgaaagattagatagcccagccacccgcatagaaggtcaccagcgccacggcgataacgaccgtaccgatgttcaacttgcgccattcgccggaaaccagacgaccaatcaccagagtcgcgaagccgatcatgatgcctgttacgatgttacaggtcagcacgatgaataccgccgtaaccagacccgccatcgcatcaacaaaatcagcaaagtcgattttcgccacgttgctcagcatcagcaggccaacgtacatcagcgccggagccgttgcataccccggaacgaggtaagagagcggagagaggaacagaatcagcaggaacagcacgccaacggtgatagccgtcaaaccggttttaccgcccgccgccgtacccgccgcagactcgatgtataccgctgccggagctgcacccaccaggccagagaaaacgctgctcatggagtcagtggtcagtgctttcccaccgtcgataatttgcccatctttatccagcaggttcgcctggccggcgacggcacggatagttccggtggcatcaaatactgccgtcattaccagcgccagaacgcttggcaggactacaggattcagcgcgcccataatgtccaggctgccaatcagtgaattgccgttttcatcgctcaatgaaggcatggcgaaaacgccggagaaatggacgttaggatcgaagatcaaaccgacaattgagataccgataatggtcagcagaatgccaccagggactttcagtttttccaggccgatgatcaccgccagacctaccagtgacataatcaccgggaaggtcgcgaaatcacccagcgcaacgggcagaccatcaagcgggtttttaattaccagaccgacaccattagcggcaatgagcagcaggaacagaccgataccgatccccgtgccgtgcgccacaccgtgcggcaagttgcgcaaaatccagctacggatacccgtggcagaaattaccgtaaacagcacccccatcaggaacacggcacccagcgcgacaggtacgctaatatgttgccccagcaccaggctgaatgcggtaaacgccgtcagggagatggcgcaaccaatcgccaacggcagattagcccacagacccatcacgatagaaccgagtccggcaaccagacaggttgcaacgaaaactgccgcaggcgggaagcctgctttacccaacatacctggaacgacgatgaccgagtagaccatcgccagaaacgttgttaacccggcaaccacttcctgacggacagtgcttccacgttgtgaaattttaaaccaggcgtcgagtgaaccgccggtacgcgctgatggcgtagacataagaaaacatcccctgagagtttaattttcgtcaagatgcgtggcggacaatcccctgccagcgaaacgttatcttcctgctccaggtttgcgacaatttactgcgtcgcaaaaaagcaaacgtttagctccgcgcatacaaaacgggtggtaaaaaaagcaaacgattatccggcgatcatagcggctttttcaaccgaagtttgctgcttttttctcttttattgtcttgacgatgaaaaaccaggcaattgatgcgcaaacgttatcgtcggtgcgcaagattgcagcgttatcgagccgtataccgttcaggattgcgataaaaaatcgtctgagatgacaaaaatattgcggataaaaagtatacttttacactggcgaagaaatgccggtgacatacaattaaagcatcaacaccaaccggaacctccaccacgtgctcgaatggggtgtgttgacgtcgggggaaaccctcctgtgtaccagcgggatagagagaaagacaaagaccggaaaacaaactaaagcgcccttgtggcgctttagttttgttcatcttccagcaagcgtgcgccggtaccttcttctcctaagcggtcgcccgggttacgcaacgggcaatcactgcgcgaaaggcagccacaaccaatacatccgtccagttcgtcacgcagcgctactaaggtatgaatgcgccgatccaactcttctcgccattgggacgaaagctgtttccactctttcgcacttaacgtatgcccttcgggcaacacgccaaacgcttcaccaatggtcgccagcggaatgccaatacgctgagcaattttgataattgcaacatatcgcaacacatcacgtttatatcgccgctgattgccgctgtcacggatactggtaatcaaccctttactttcatagaaatgcagcgccgataccgccacaccgctgcgtttcgccacttcgccgggggttagcagcgctttaatgcggggtaatttcttttccataaatcgctttacctcaagttaacttgaggaattatactccccaacagatgaattaacgaactgaacactgaaaagaggcagatttatgtcccatcagaaaattattcaggatcttatcgcatggattgacgagcatattgaccagccgcttaacattgatgtagtcgcaaaaaaatcaggctattcaaagtggtacttgcaacgaatgttccgcacggtgacgcatcagacgcttggcgattacattcgccaacgtcgcctgttactggccgccgttgagttgcgcaccaccgagcgtccgatttttgatatcgcaatggacctgggttatgtctcgcagcagaccttctcccgcgttttccgtcggcagtttgatcgcactcccagcgattatcgccaccgcctgtagttttattgcccgcgcgttaactcccgcgcgggtaattgctccatccattgcataaacacctgcggcggcatcgccttcgcaaaaaaccatccctggcaatagcgcacgccgcgtttgcgcagccagttaacctgctcctcagtttcgacgccttcagcgatcgtttttaaccccaggctgtgcgccagctcgatgatgtgttccgcaatcaaatgactggttttgtgggtggtcagcgtttcaacaaacgatttatcgattttcaaaatatcgacattcaatgatttaaggttatgcaagttagagtagccaataccaaaatcatcaattgccacttcgtaaccagcctggcggaaagccagaataatcggcgtcattttttcgacatcaagaaatgcatgctcagtcacttcaaatttaatttgctgcggacgcaccgcgtattgctctgttttctgattgattcgcgctatcaaccgtgacgtatgaaaatcggaggccgacaggttaatagaaacatagcgatcggcatgtgttgccaagtacgcgcccagatcgaggaagacattatcaataacataatcagttatctgttctatcatcccctccttttctgccagcggaataaactctgccggattcattatttgcccctgctcaccaagccaacgtaacaacgcttcagcgccgatacatttttctgttttgatatcgattattggctggtaataaagacaaagttgatgtttttcgagggcgcgttgcaatttacgtttgggagataaatagttttgtcgaatacgtagccagagtaatagcagaacaagactccccaaaataccggcgggcaacgcaaaaataagatgattataaaaatgggttataagacgttgatatgaagtcgcaacaatggctgcaattgggcgttttgtcgaataaactgtcgcatataaatagccatttctttgtacggttaaatccttcaaatgaatcagcggagaaaacgttgctgccgaggcctctttgcttaacgagaaaaaggttttcgtcaccgtatcaacacaccccattgcaatgtcgggtcatcagacatcacttcactccagaagagagggttgataaccgccacataatttccccgctgcatataggtcattttatagccagagaaaaaaggcgtatcgcggtaataatagatagaaacgttaggttcacgcttataatcggccggtgcaatcgtatagccgtttacaggcgctatcagcgatgagcataaaaaatggttatcacgggcatagatcaattcattaatataaagatagccacgaataatattcaacattcgcttttgatgggctggagtgcaaacttgcccctgatagcgttcagctgcatcgctcactaaatctgcctggcgaatgaccagctcggatttatccagtgccagttgagcaaaggttcggagctgattattcacttctgattttgcccaaaggaaggcaatccatagcgaaagaatgatgggaaagagaactaaaaagataatgcccggcaacgccagtaattggtgtcgtgcacgatgactcattgctatcaatttcctgcctgtttatacccggccattgcaaggtgaaaaccctgggtaccgacgtctttagataaatcttacggtataaatagcacttttgcctgatttgaaattgatacctttctaatcgtcacctggatgaaaataattcattgatattcaaaattaatttcctannnnnnnnnnggaatgcagaggcggcgggaagatatgcccttaatgccactgaaaaaccacataatctgtacagcaataaaagtcacggcctaatatggctaacaaacaatcaattgtgatatagttcacaaaattaatgaaacaaacagagtgtttcatttttgtgttctgcaagccccgcgatagccagagtgtaccacgcctcccgtgaacaacgccgcgctgtccagggcatcggctcttttcagaggaattgtttgatggctaccctcaccactggcgtggttcttcttcgctggcaacttcttagtgccgtaatgatgtttctggccagcacactcaacatccgttttcgtcggtctgattatgtcgggcttgcggtgatcagcagcggtctgggcgttgtttccgcctgttggttcgcaatggggttgcttggcatcacaatggcggacatcaccgctatctggcacaacatcgagtcggtgatgatagaagagatgaatcagacaccgccacaatggccaatgattttgacctgatacgtagaagcctccataacggaggcttcttttttatggctggcagatgctttaatcatccaccttaaaacaatataacctattgttttaatgacaaatcagaacggaatgtcatcatcaaagtccatcggcggctcgttagacggcgctgccggagcggactgctgcgggcgagactgcgcgccgccgctgaactgattgccaccctgcggctgctgaggctgaccccaaccgccctgcggctgaccaccaccgatattaccacctgccggagcgccaccaccctgacgaccacccagcatctgcatggtgccgccaacgttcaccacgacttctgtggtgtagcgatcctgaccggattgatcggtccatttacgggtacgcagctgaccttcgatataaacctgagaacctttacgcagatattcgctggccacttctgccagtttgccgaacagcacaacgcggtgccattcagtctgttctttcatctcgccggtcgctttatcacgccaggattcggaagtagccagcgtaatgttggcaactgcgccaccatttggcatgtagcgtacttccgggtcctgacccagattaccaacgagaataaccttgtttacgcctctgctggccatgttcgtgtctcctgaaaaaaatcgttctgaataagtgtaaacgcgcgattgtaccattaccaatagcgcttttactatgttgtgacctcggttccgggaaacaaacctggccagacattgttacacaacactccgggtaatgcattccaatactgtatattcattcaggtcaatttgtgtcataattaaccgtttgtgatcgccggtagcaccatgccaccgggcaaaaaagcgtttaatccgggaaaggtgaatggataagatcgaagttcggggcgcccgcacccataatctcaaaaacatcaacctcgttatcccccgcgacaagctcattgtcgtgaccgggctttcgggttctggcaaatcctcgctcgctttcgacaccttatatgccgaagggcagcgccgttacgttgaatccctttccgcctacgcgcggcagtttctgtcactgatggaaaagccggacgtcgatcatattgaggggctttctcctgccatctcaattgagcagaaatcgacgtctcataacccgcgttctacggtggggacaatcaccgaaatccacgactatttgcgtttgttgttcgcccgcgtcggcgaaccgcgctgtccggaccacgacgtcccgctggcggcgcaaaccgtcagccagatggtggataacgtgctgtcgcagccggaaggcaagcgtctgatgctgctcgcgccaatcattaaagagcgcaaaggcgaacacaccaaaacgctggagaacctggcaagccagggttacatccgtgctcgtattgatggcgaagtctgcgatctttccgatccgccgaaactggaactgcaaaagaaacataccattgaagtggtggttgatcgcttcaaggtgcgtgacgatcttacccaacgtcttgcggagtcgtttgaaaccgcgctggagctttccggtggtacagcggtagtggcggatatggacgacccgaaagcggaagagctgctgttctccgccaacttcgcctgcccaatttgcggctacagtatgcgtgaactggagccgcgactgttttcgtttaacaacccggcaggtgcctgcccaacctgtgacggccttggcgtacagcaatatttcgatcctgaccgcgtgatccaaaaccccgagctgtcactggctggcggtgcgatccgtggctgggatcgccgcaacttctattacttccagatgctgaaatcgctggcagatcactataagttcgacgtcgaagcgccgtggggcagcctgagcgcgaacgtgcataaagtggtgttgtacggttctggcaaagaaaacattgaattcaaatacatgaacgatcgtggcgatacctccatccgtcgtcatccgttcgaaggcgtgctgcacaatatggagcgccgttataaagagacagaatccagtgcggtacgtgaagaattagccaagtttatcagcaatcgcccatgcgccagctgcgaagggacgcgtctgcgtcgggaagcgcgccacgtttatgtcgagaatacgccgctgcctgctatctccgacatgagcatcggtcatgcgatggaattcttcaacaatctcaaactagctggtcagcgggcgaagattgcggaaaaaattcttaaagagatcggcgatcgcctgaaattcctcgtaaacgtcggcctgaattacctgacactttcccgctcggcagaaacactttccggcggtgaagcccagcgtatccgtctggcgagccagattggtgcgggcctggttggcgttatgtatgtactggacgagccgtctatcggcctgcaccagcgcgataacgagcgcctgttgggtacgcttatccatctgcgcgatctcggtaataccgtgattgtggtggagcatgacgaagacgcaattcgcgccgctgaccatgtgatcgatatcggtcctggtgcgggtgttcacggcggtgaagtggtcgcagaaggtccgctggaagcgattatggcggtgcctgaatcgttgaccgggcagtacatgagcggtaaacgcaagattgaagtgccgaagaaacgcgttccggcgaatccagaaaaagtgctgaagctgacaggtgcacgcggcaacaacctgaaggacgtgacgctcacgctgccagtcggtctgtttacctgcatcacaggggtttcaggttccggtaaatcgacgctgattaacgacacactgttcccgattgcccaacgccagttgaatggtgcgaccatcgccgaaccggcaccgtatcgcgatattcaggggctggagcatttcgataaagtgatcgatatcgaccaaagcccaattggtcgtactccacgttctaacccggcgacctataccggcgtgtttacacctgtgcgcgaactgtttgcgggcgtaccggaatcccgtgcgcgtggttatacgccaggacgtttcagctttaacgtccgtggcgggcgctgcgaagcctgtcagggcgacggtgtgatcaaagtggagatgcacttcctgccggatatctacgtgccgtgcgatcagtgcaaaggtaaacgctataaccgtgaaacgctggaaattaagtacaaaggcaaaaccatccacgaagtgctggatatgaccatcgaagaggcgcgtgagttctttgatgcggtgccagctctggcgcgtaagctgcaaacgttgatggacgttggtctgacgtacattcgcctggggcagtccgcaaccacactttctggtggtgaagcccagcgcgtgaagctggcgcgtgagctgtcaaaacgcggcaccgggcagacgctgtatattctcgacgagccgaccaccggtctgcacttcgccgatattcagcaactcctcgacgtgctgcataaactgcgcgatcagggcaataccattgtggtgattgagcacaatctcgacgtgatcaaaaccgctgactggattgtcgacctgggaccagaaggcggcagtggcggcggcgaaatcctcgtctccggtacgccagaaaccgtcgcggagtgcgaagcttcgcatacggcacgcttcctcaagccgatgctgtaatcgttaaggccgctttctgagcggccttttcctttcagagttgtaccagcaatttacgcttttcttccggtagtaaattcactgcctgctgataagacgcatccaccagataatagatttgcgaatccggcagcgaaccgtcgagatacacggtgctccagtgcgctttattcagatggcggctaggacgcacatcgctgtgctgctgacgtagcagctccgccagctccgggctggttttcagcgaaacagctgggcgattttctacttctttcaccatcgcaaacagtacatcttccactttgatctgcgtcgctttccagtcgttatgcacgctctgttctgcgcctggttttgccatgcaatattgtagcaactccgaaatggtcattttttactccccttgtagtgtcgcgatgatgcgacgcgatccgccgtggatgcgatgttcccccagccagatgccttgccaggtgccggtctgaatacgccctttatgtaacggcaatacaagcgatgttcccagcattgaggatttgatatgagaaggcatatcgtctgctccctcatagtcatgctcataatttccgttgtcgggaacggtgcggaggaaaaaacgctccatgtcgtggcgtacggtgggatcgcagttctcattaagtgtcagagaggcggaggtatgttgcagcaacagatgcagtaagccgatgttaacgcgcggcatatcagccagctgattcagaatttcatccgttaccagatgaaacccacgagatttggcgctaagcgtgagcgtcttttgataccacatgtgctgctccttgataaaactctcttaatcagtttgcagcaagacagcgaaaggataaaggtgtgattaaaaaaacagcattcgggagagtgtcacgctctcccgctctgtcagtattctgaattgacgatcacctcttcaccaaacgcacccgcttgtggcaagggtttgtaggtagagttggaggcgcgcagaatgcggataccacgagcgccgacatcgcgtgcagcggtaatatcgttatcggaatcgccataaaaaattcggatatttttatcctgcagccattgcgattttgtattttgccctggtttatcgcccgcaaagatcaccggattcatgttggtgacaggaatatgaaaattatccgccagcgtttttgaaaccgtttctgttttcgtcgggctacgaccagtcacaaagaagatcgcgtcaccgcggcgtacatgcatatcaatcagctggcgagcgacctcttttggaatgctgaattcatcccagccattgttcattttttcccagaacacaggatttttcagataatcttcgctttctggtgagaaggtttttttgccgcgccagaagcccgggctggaaaaaagtaccgtgtcatcgatatcaaaccccaccgccattggcggacgccctgcgaggctattttcaatttgtgcgaccgaaacccaatgaattggtgcctgttcagcaagcctggcaacgttagtcccagggttaagcggtgaaggagatgaggccagggcaacagcggaactgtttagagcgaacaataagcaaacggcactgattgcctgtgtgatcttgcgcatatttttccctaaatagtcagtatgttgaaactttttattgtgagatttgttgcaaaaaccatctgaccataacgccagctgccggggaaaggaaggattatctgcggtttttgtgatgaaaagcaggatgattatgtttaacccagtaaatacgttcctgtctttttttgtataaaaaatgtttattactcgatgtaaggatacattaattttacgtttattatgatgaatcctctgcaaatgagcgaaatttgatagaacatttatctgctgtacgatttaatgaac

SEQ ID NO: 286 - DNA, 13404 bp, Escherichia coli
  source 1..13404: mol_type = genomic DNA
gcggcattcggcttcctcattactgccgttggcctgccggtattaacggtagtggcgctggcaaaagttggcggcggtgttgacagcctcagcacgccaatcggtaaagtcgctggcgtactgctggcaacggtttgttacctggcggtggggccgcttttcgctacgccgcgtacagctaccgtttcttttgaagtggggattgcgccgctgacgggtgattccgcgctgccgctgtttatctacagcctggtctatttcgctatcgttattctggtttcgctctatccgggcaagctgctggataccgtgggcaacttccttgcgccgctgaaaattatcgcgctggtcatcctgtctgttgccgcgattgtctggccggcgggttctatcagcacggcgactgaggcttatcaaaacgctgcgttttctaacggcttcgttaacggctatctgaccatggatacgctgggcgcaatggtgtttggtatcgttattgttaacgcggcgcgttctcgtggcgttaccgaagcgcgtctgctgacccgttataccgtctgggctggcctgatggcgggtgttggtctgactctgctgtacctggcgctgttccgtctgggttcagacagcgcgtcgctggtcgatcagtctgcaaacggcgctgctattctgcatgcttacgttcagcacacctttggcggcggcggtagcttcctgctggcggcgttaatcttcatcgcctgcctggtaacggcagttggcctgacctgtgcttgtgcagaattctttgcccagtacgtaccgctctcttatcgtacgctggtgtttatcctcggcggcttctcgatggtggtttctaacctcggcttaagccagctgatccagatctccgtaccggtgctgaccgctatttatccgccgtgtatcgcactggttgtattaagttttacacgctcatggtggcataattcgtcccgcgtgattgctccgccgatgtttatcagcctgctttttggtattctcgacgggatcaaagcatctgcattcagcgatatcttaccgtcctgggcgcagcgtttaccgctggccgaacaaggtctggcgtggttaatgccaacagtggtgatggtggttctggccattatctgggatcgcgcggcaggtcgtcaggtgacctccagcgctcactaaatcactgaacatttgttttaaccacggggctgcgatgccccgtggttttttattgtgttgatgggttaggaattgatggaaagtaagaacaagctaaagcgtgggctaagtacccgccacatacgctttatggcactgggttcagcaattggcaccgggctgttttacggttcggcagacgccatcaaaatggccggtccgagcgtgttgttggcctatattatcggtggtatcgcggcgtatatcattatgcgtgcgctgggggaaatgtcggtacataacccggccgccagctctttctcgcgttatgcgcaggaaaacctcggcccgctggcaggttacattaccggatggacctactgctttgaaatccttattgtcgccatcgccgatgtgaccgcttttggtatctatatgggtgtctggttcccgacggtgccgcactggatttgggtactgagcgtggtgctgatcatttgcgccgtaaacctgatgagcgtgaaggtcttcggtgagctggaattctggttctcgttctttaaagtcgccaccatcatcatcatgattgtcgccggtttcggcatcatcatctgggggattggcaacggcgggcaaccgaccggtattcataacctgtggagcaacggcggcttcttcagtaacggctggcttggcatggtaatgtcgttgcaaatggtgatgtttgcttacggtgggatcgaaattatcgggattaccgccggtgaagcgaaagatcctgagaaatcgataccgcgtgcgattaactccgtgccgatgcgtattctggtgttctacgtcggtacgctgttcgtcattatgtctatctacccgtggaatcaggttggcactgccggtagcccgttcgtgctgacgttcgagcatatgggcattacctttgccgccagcattcttaactttgttgtgctgactgcttcgctgtcggcaattaacagtgatgtatttggcgtaggccgtatgctccacggtatggcagagcagggcagcgcgccgaaaattttcagcaaaacgtcgcgtcgcggtattccgtgggttacggtgctggtgatgactaccgcgctgctgtttgcggtgtatctgaactacatcatgccggaaaacgtcttcctggtgatcgcttcgctggcaaccttcgccacggtgtgggtgtggattatgatcctgctgtcgcaaattgccttccgtcgccgtttgccgccagaagaagttaaggcgctgaaatttaaagtgccgggtggggtagcaacgaccatcggcgggctgattttcctgctctttattatcgggttgattggttatcacccggatacgcgtatctcgctgtatgtcggtttcgcgtggattgttgtgctgttgattggctggatgtttaaacgccgccacgatcgtcagctggctgaaaaccaataatacttgcgttctgtaatcctgatccggctattccgaaagttatccgcccccgtcctcctcccccaaatatccttcagatgatgagtgatcctgcattaggctatggcaaggtgatcagattttcatcacaggggaattatgatgttaaatgcatggcacctgccggtgcccccatttgttaaacaaagcaaagatcaactgctcattacactgtggctgacgggcgaagacccaccgcagcgcattatgctgcgtacagaacacgataacgaagaaatgtcagtatcgatgcataagcagcgcagtcagcagcagcctggcgtcaccgcatggcgtgcggcgattgatctctccagcggacaaccccggcggcgttacagtttcaaactgctgtggcacgatcgccagcgttggtttacaccgcagggcttcagccgaatgccgccggcacgactggagcagtttgccgtcgatgtaccggatatcggcccacaatgggctgcggatcagattttttatcagatcttccctgatcgttttgcgcgtagtcttcctcgtgaagctgaacaggatcatgtctattaccatcatgcagccggacaagagatcatcttgcgtgactgggatgaaccggtcacggcgcaggcgggcggatcaacgttctatggcggcgatctggacgggataagcgaaaaactgccgtatctgaaaaagcttggcgtgacggcgctgtatctcaatccggtgtttaaagctcccagcgtacataaatacgataccgaggattatcgccatgtcgatccgcagtttggcggtgatggggcgttgctgcgtttgcgacacaatacgcagcagctgggaatgcggctggtgctggacggcgtgtttaaccacagtggcgattcccatgcctggtttgacaggcacaatcgtggcacggggggagcttgtcacaaccctgaatcgccctggcgcgactggtactcgtttagtgatgatggcacggcgctcgactggcttggctatgccagcttgccgaagctggattatcagtcggaaagtctggtgaatgaaatttatcgcggggaagacagtattgtccgccattggctgaaagcgccgtggagtatggacggctggcggctggatgtggtgcatatgctgggggaggcgggtggggcgcgcaataatatgcagcacgttgctgggatcaccgaagcggcgaaagaaacccagccggaagcgtatattgtcggcgaacattttggcgatgcacggcaatggttacaggccgatgtggaagatgccgccatgaactatcgtggcttcacattcccgttgtggggatttcttgccaataccgatatctcttacgatccgcagcaaattgatgcccaaacctgtatggcctggatggataattaccgcgcagggctttctcatcaacaacaattacgtatgtttaatcagctcgacagccacgatactgcgcgatttaaaacgctgctcggtcgggatattgcgcgcctgccgctggcggtggtctggctgttcacctggcctggtgtaccgtgcatttattacggtgatgaagtaggactggatggcaaaaacgatccgttttgccgtaaaccgttcccttggcaggtggaaaagcaggatacggcgttattcgcgctgtaccagcgaatgattgcgctgcgtaagaaaagtcaggcgctacgtcatggcggctgtcaggtgctgtatgcggaagataacgtggtggtatttgtccgcgtgctgaatcagcagcgtgtactggtggcaatcaaccgtggcgaagcttgtgaagtcgtgctacccgcgtcaccgttgctcaatgccgtgcaatggcaatgcaaagaagggcatgggcaactgactgacgggattctggctttgcctgccatttcggctacggtatggatgaactaacgttttataacgccttgtgtgacgcctgcgccatcatccgcggataaaactgccagaagcgggtttcgagggcgtcataatgagcgtctaaatcgtaccaggagtcacgcagggcatccagacgtgggcggcggcttgccatgccgtttaacacgttctggatgaaatccatatcgcgatagcgcaccagccactgctctgaccacaagtaattgttcagattgataaaacgtggcggtgagtccggcaaaatcgtcatcacttgctcgcgggcataacagacaaattcctgtagcggaaagtccggcgacagctgcgaccagtggcgggaaagaaagtgatcccacatgacatccagcgtaataggcgcaacgcggcgagtttcactacgaaaccattcccgtgcttcgcggacttccggcagattgtcggttaatacgtcgatacgtcgatgcatatgaatgccagccacgacgtcgggcggaaaactttcttcaggatttccgcgtacgaaatcagccagtaaattgccggaaagcgagctttccgcgagatgggctaaatgcaggtgagctaaaaaattcatcgattatattctatccaaaagggggtaaaggttgcagggagagcgccccggcactagactacccgcctcttattttagtctgagtcagtgtcatgcgcgttaccgatttctcctttgaattgcccgaatccctgattgcccactatcccatgcctgaacgcagtagctgtcgtttactgtcgctggacgggccgacgggcgcgctgacgcacggtactttcaccgatttacttgataagctcaaccccggcgatcttctggnnnnnnnnnnaataatacccgcgtgatcccggcgcgcctgtttgggcgtaaagccagcggcggcaagattgaagtgctggttgaacggatgctcgacgacaaacgcattcttgcgcatattcgcgcctcgaaagcgccaaaacctggcgcagaactgctgctgggcgatgacgaaagtattaacgcaacaatgaccgcgcgccacggcgcactgtttgaagtcgaatttaatgatgaacgctcggtgctggatattctcaacagcatcggccatatgccgctgccgccgtatatcgaccgtccggacgaagacgctgaccgcgaactttatcaaaccgtttatagcgaaaaaccgggcgcggttgcagccccgaccgcaggtctgcattttgacgaacctttgctggaaaaattacgcgccaaaggcgtggagatggcgtttgtgacgttgcacgttggtgcgggcaccttccagccggtgcgcgtcgacaccattgaagatcacatcatgcactcggaatacgctgaagtgccgcaggatgtggtagacgcggtactggcggcgaaagcgcgcggtaaccgggtgattgcggttggcaccacctcagtacgttcgctggaaagcgcggctcaggcggcgaaaaacgatcttatcgaaccgttctttgacgatacccaaatctttatctatccgggcttccagtacaaagtggtcgatgcgctggtgacaaacttccacctgccggaatcgacgctgattatgctggtttcggcctttgccggttatcaacacaccatgaatgcctataaagcagcggtagaagagaaatatcgcttttttagttacggtgatgcgatgtttatcacgtacaatccgcaggcaattaatgagcgcgtcggggagtaattccgcggcgctggtttaaaacgttggactgtttttctgacgtagtggagaaaaaatgaaatttgaactggacaccaccgacggtcgcgcacgccgtggccgcctggtctttgatcgtggcgtagtggaaacgccttgttttatgcctgttggcacctacggcaccgtaaaagggatgacgccggaagaagttgaagccactggcgcgcaaattatcctcggcaacaccttccacctgtggctgcgcccgggccaggaaatcatgaaactgcacggcgatctgcacgattttatgcagtggaaggggccgatcctcaccgactccggcggcttccaggtcttcagccttggcgatattcgtaaaatcaccgaacagggcgtgcacttccgtaacccgatcaacggcgatccgattttcctcgatcctgaaaaatcaatggagattcagtacgatcttggttcggatatcgtcatgatctttgatgagtgtacgccgtatcctgctgactgggattacgcaaaacgctccatggagatgtctctgcgttgggcgaagcgtagccgtgagcgttttgacagtctcggaaacaaaaatgcgctgtttggtatcattcagggcagcgtttacgaagatttacgtgatatttctgttaaaggtctggtagatatcggttttgatggctacgctgtcggcggtctggctgtgggtgagccgaaagcagatatgcaccgcattctggagcatgtatgcccgcaaattccggcagacaaaccgcgttacctgatgggcgttggtaaaccagaagacctggttgaaggcgtacgtcgtggtatcgatatgtttgactgcgtaatgccaacccgcaacgcccgaaatggtcatttgttcgtgaccgatggcgtggtgaaaatccgcaatgcgaagtataagagcgatactggcccactcgatcctgagtgtgattgctacacctgtcgcaattattcacgcgcttacttgcatcatcttgaccgttgcaacgaaatattaggcgcgcgactcaacaccattcataaccttcgttactaccagcgtttgatggcgggtttacgcaaggctattgaagagggtaaattagagagcttcgtaactgatttttaccagcgtcaggggcgagaagtaccacctttgaacgttgattaatattaataatgagggaaatttaatgagcttttttatttctgatgcggtagcggcaacgggtgcaccggcgcaaggtagcccgatgtctttgattttgatgctggtggtattcggtctgattttctatttcatgatcctgcgtccacagcagaagcgcaccaaagaacacaaaaagctgatggactccattgccaaaggtgatgaagttctgacgaacggtggcctggttggtcgcgtaaccaaagtagcggaaaacggctacattgctatcgcgctgaatgacaccactgaagtagttattaaacgtgacttcgtagctgccgtcctgccgaaaggcaccatgaaggcgctgtaattaaaatttttccctaagggaattgccgtgttaaaccgttatcctttgtggaagtacgtcatgctgatcgtggtgattgtcatcggtctgctgtatgcgcttcccaacctgtttggtgaggatccggctgttcagatcactggtgcgcgcggagtcgccgccagtgagcaaacgctgatccaggtccagaaaacgttacaagaagaaaaaataactgctaagtctgtggcactggaagagggcgctattcttgcgcgcttcgactccactgacacccagctgcgcgctcgtgaagcattaatgggcgttatgggtgacaaatacgtcgtggcgcttaaccttgccccggcaacgccgcgctggctggcagctattcacgctgagccgatgaagctcggccttgacctgcgtggcggcgttcacttcctgatggaagtggatatggacaccgcgcttggcaaactccaggaacaaaatatcgatagcctgcgcagcgatctgcgtgaaaagggcatcccgtataccaccgttcgtaaagaaaacaactacggcctgagcattactttccgcgatgctaaagctcgtgatgaagccattgcgtatctgagcaagcgccatccggacctggtaattagcagccagggcagcaaccagctgcgtgcggtaatgagcgatgctcgtctgagtgaagcgcgtgaatatgcggtgcagcagaacatcaatatcctgcgtaaccgtgtaaaccaacttggcgtggcggagccggtggttcagcgtcagggtgctgaccgtatcgttgttgaactgccaggtattcaggacactgcgcgtgcgaaagagattctgggtgcgacggcaacgctggaattccgtctggtaaacaccaacgttgaccaggccgctgcggcatccggtcgcgtaccgggcgactctgaagtgaaacagacccgcgaaggtcagccagttgtgctgtacaaacgcgtaattctgaccggtgaccatatcaccgactccacttccagccaggacgaatacaaccagccgcaggttaacatctcgctcgatagcgctggtggtaacatcatgtctaacttcactaaggacaacatcggcaaaccgatggcaaccctgtttgtggagtacaaagacagcggtaagaaagatgcaaatggtcgtgcggttctggtgaaacaggaagaggtgattaacatcgccaacatccagtctcgtctgggtaacagcttccgtatcaccggcatcaacaacccgaacgaagcccgtcagctgtcactgctgctgcgtgccggtgcgttgatcgcgccgattcagattgttgaagaacgtaccattggcccaaccctgggtatgcagaacattgaacaggggctggaggcttgccttgccggtctgctggtttctattctgttcatgatcatcttctataagaagtttggtctgattgcgaccagtgctctgattgccaacttgatcttaatcgtcggcattatgtcgctgttgccaggcgcaacgctgagtatgccaggtatcgcgggtatcgtcttaacccttgcggtggcggtcgatgcgaacgtactgatcaacgaacgtattaaagaagagttgagcaacggacgtactgttcaacaggcaattgatgaaggttatcgtggcgcattcagttctatcttcgatgcgaacatcaccacgctgattaaagtcatcatcctgtacgcagtgggtaccggggcaattaaagggttcgcgattactaccggtatcggtgtggcgacgtcgatgtttaccgcgattgtcggtacgcgtgccatcgtaaacctgctatatggcggcaagcgcgtcaagaagctgtcaatctgaggagtgcgatgtggcacaggaatatactgttgaacaactaaaccacggccgtaaagtctatgactttatgcgctgggactactgggctttcggcatctctggtctgctgttaatcgccgctatcgttattatgggcgtgcgcggctttaactgggggctggatttcaccggtggtacggttatcgaaattacgctcgaaaaaccggctgaaattgacgtaatgcgtgatgcattgcaaaaagccggttttgaagagccaatgctgcaaaactttggtagcagccacgacatcatggtccgtatgccgcctgctgaaggcgaaaccggcggtcaggtgctgggcagccaggttctgaaggtgattaacgaatccaccaatcagaatgcagcagtgaagcgtattgagttcgtcggtccgagcgtgggggcagaccttgcgcaaaccggtgcgatggcgttgatggcggcgctgctgtctatccttgtgtacgtaggttttcgctttgagtggcgactggcggcaggggttgttattgcgctggcgcacgacgttatcattacgctgggtattttgtcgttattccatatcgagattgacctgaccattgtggcatcgttgatgtcggttatcggttactcgcttaacgacagtatcgtggtatcggaccgtattcgtgaaaacttccgcaagatccgtcgcggtacgccttacgaaatctttaacgtgtccttgacccagacgctgcaccgtaccttgatcacatccggtactaccttgatggttatcctgatgctgtacctcttcggtggtccggtactggaaggcttctcgctgaccatgcttatcggtgtttccatcggtactgcatcttccatctatgtggcatctgcgttggctctgaaactgggtatgaagcgcgaacacatgttgcagcagaaagtggaaaaagaaggggcggatcagccgtcaattctgccgtaatcaagttcccgttgatgttgaaaatcccggtcagaagatcgggattttttttgatgtatggagattgcgaaaatccccgcatcttgggaaactgcgcgtaaccctacatttcatccaggtaactcttcatggctatcatcccaaaaaactatgcgcggttagaaagcggctatcgcgaaaaagcattaaaaatatatccgtgggtctgcggtcgctgttcccgcgagtttgtttattccaacctgcgtgaacttactgttcaccacattgatcacgaccataccaataacccggaagatggcagtaactgggaattgctttgtctctattgccacgatcatgagcattcgaaatataccgaagcggatcagtatggtacgaccgttatcgcaggggaagatgcgcagaaagatgtcggtgaagcgaagtacaacccattcgctgacctgaaagcgatgatgaacaagaagaagtgattaaaacgtaaaattgcctgatgcgctacgcttatcaggactacgttatttcagcaatatattgaatttacgtgcttttgtgggtcggacaaagcgtttacgccgcatccggcatgaacaaagcgcacgttgttaacaatctgaaatgccgggaataaatcccggcattttcataatcagaagttgtaacctacaaccaggtaaccaccccagccggtagagcgaacgttgaagttgccgttgccgaagttcagttctgcatcgtcgttccactgaccaccgtcgtgccagtaacgagctacgacagagtagtgccagtgatcgtagttcagagccagaatatggctggaagcgatagagttattagtacgggtcttaataccgttgattgcgttaccgctgtcatcccctaaatcggaaccccagtcgaagttggtgaagccgatgtagctcagctgaccgccccacagatcggtaatcggcacaaagtatttaattttgaaacggtaaccgtcccactcgttttcgttcgctgcgccatagttctgccactggtatttcgcatagacgttcatggacaggctcatcggcagaccagtatcgatgtcggtacccagacccatgtaccaggtgctctggcgaccatctttattacgacccatgtcgtaaatgtagttgttcgcgaagtaccactctttgaacggaccgaagctaaggtcagtattggtcagcttgtcgatggagaaacgtggttcgatttccataaacagcggagaaccgtggttccagatacctttagcatcggagttaccgccgaagaataccggcgcatccgcataaccatagaagtcgaaccagtcttttttagcgaatgcttcgtactcaaggtaggtatcgttgcggatctgcggtccgaaacgggtgtgatagcttccgacaacgttaacgctctggtgccaccagtcggaaagatactgcggtttgtcgttttcagctgcgttgacagtaaaagacgaagagagcgccagtaccgcaccggctgccagtaatgtttttttcatatgtatgccactgtttgaaaatcccttgcgggagtgaaaaaggtgcaaattgcgtttctaaatatttcgtatacagaggagcctattataaaaatcattgctcacaaaaatatgtttcgtttcacagttctatcatttacgtaatcgattgcgttcacgtttacacacattcgggcagggattgtactgactttcacccttgttgcaaacttttactatcaatcagggtgatgtaagcggagtaacaaaatgacggggaaagatgttgcgagacgcacaaaatcgccccgaaatacgtttactgcataacaggttgaatatcgtggatacgtacgaagtctaactgttctacagaaataccctttaactgtaacggaatatcaacatcgctgggggcgaggacgctggcaggggcattaatcaattgattctgcacattgatttcctgaaagttgtctattgttccctgaatttgcccatattcaacagttccgctgaatgcgggcaagggatcattcgactcgccctgaatacgtagcgtcagggtggtgccatctgcatcaggcgtaatattcaccagcgacatacgtaaagtaccgatctggctttccagtcttgccggtgttttcgctcctggcagaaggtaaaccccactgctggattttgcattcagcctgttttgctgagtgattttgaccgtttctttattgagttgcgtcatctcttggttcagcgtgctgacgctgtgtttcatctgtcgcacttcgctctgctgcacacaggcgctaaggctgaacaggcttcccagcaggagcagtcgaaaaacgttagtattcataggtcgtccctttctcgtcgcaattagcctaatggtagagggtaaaagcagcgaaagcatcgatcctttatctcaaaagcgttgcgcctttgttgtatcgtcagttcagggtaaaatagatttctgttaaccacctggtcaggacgccgtatgcattgcccattctgtttcgccgtggacactaaggtaattgactctcgtctcgtgggcgagggttcatccgtacgccgccgtcggtagtggctggtgtgtaatgaacgtctcatcacctttgaagtggcgga

SEQ ID NO: 287 - DNA, 13224 bp, Escherichia coli
  source 1..13224: mol_type = genomic DNA
gatgaaaatactatctcatttatcttttatgcctatataatccaccgcattattgtcattttatttttgatatccaattttttcgtggtgtatatgtctaataaaatctttacgcattccctacctatgcgctatgccgattttccaacgctggttgatgctttggactacgccgctctgagtagcgccggaatgaatttttatgacagacgttgccaacttgaagatcaactggaatatcagacattaaaaacgcgtgccgaagctggtgcgaagcggttgttatcgctgaacctgaaaaaaggcgatcgcgtggcactgattgccgaaacaagtagcgggttcgtagaggctttttttgcctgccagtatgccggcttagtcgccgtcccgttggcgattccaatgggcgttggtcagcgggattcctggagcgccaaattgcagggtttactggcaannnnnnnnnngccattatcactggtgatgagtggttgccactggtcaatgccgcgacgcatgacaaccccgaattacatgttttaagccacgcctggtttaaggcattaccggaagccgatgttgcgctccagcgtccagttccgaacgatatcgcctacctccagtacacctccggcagcacccgttttccccgtggcgtcattatcacccatcgcgaagtgatggctaatctacgtgctataagccacgacggcattaaattacgccctggcgaccgctgcgtctcctggctgcctttctaccatgatatgggactggtcggctttctcctgacccccgtcgccacgcagctttcagtagattatttgcgcactcaggattttgccatgcgtcctctgcaatggcttaaattgatcagtaaaaatcgcggcaccgtttccgttgcgccgccgtttggctatgaattgtgccagcgccgcgtgaatgaaaaagatctcgctgaactggatctttcctgctggcgcgtcgctggtattggtgcagaacccatctccgcagaacaactccatcaattcgctgaatgtttccgtcaggttaactttgacaataaaactttcatgccgtgctacggactggcagaaaatgcgctggctgtcagcttctctgatgaagcctccggggttgtggttaacgaagtggatcgcgacatcctcgaatatcagggtaaagccgtcgcgccgggtgcagagacacgcgccgtatcgactttcgtcaactgcggcaaagcgttgccggaacatggtattgaaatccgcaatgaagcaggtatnnnnnnnnnngtcgcggaacgtgtggtaggccatatttgcatctccggtcccagtctgatgagcggttactttggcgaccaggcttcgcaagacgagattgccgcgacgggctggttagacaccggcgacctcggttatctgctggacggttatctgtatgtcaccggacgcattaaagatctgattattattcgtggccgtaatatctggccgcaggatattgaatatattgcggaacaagaaccggaaattcattctggcgatgcgattgcttttgttaccgcccaggaaaaaatcattttgcagatccagtgtcggatcagcgacgaagaacgtcgcgggcagcttatccacgcgctggcggcacggatccaaagcgaatttggcgtgaccgcggctatcgagctgttgccgccccacagtattccccgaacgtcctccggcaagcctgcccgtgcggaagcgaaaaaacgttatcagaaggcttatgctgccagtcttcatgtgcaggaatccctggcatgaatcaaactgtcgcggtgacgggcgctaccgggtttatcggtaaatatattatcaataacctgctcgcccgcggctttcacgttcgcgcattgacgcgtactgcccgcgctcacgtcaatgataatctcacctgggtgcgcggttcgctggaagatactcattcacttagcaagctggttgccggagccagcgcggtggtccattgcgccgggcaagtgcgcgggcacaaagaagagatttttacccactgtaacgttgacggcagcctgcgcctgatgcaagcagcaaaagagagcggcttttgccaacgttttctgtttatctcttcgctggcggcgcgccatcccgagctctcctggtacgcaaattccaaacacgtcgccgaacaacgtctgactgcaatggctgacgaaattacgctgggcgtttttcgcccgacagccgtgtatggtcccggcgataaagagttaaaaccgctgtttgactggatgctgcgcggcctgctgccacgacttggtgcgccagatacacagctctctttcctgcacgtcaccgatttcgcgcaagcagtgggtcagtggttaagcgccgaaactgtacagacgcaaacctatgaattatgcgatggcgtccccggcggctatgactggcaacacgtacgacagcttgccgccgacgcccgttgtggttccgtgcgaatggttggcattcctctgccggtactcacctgccttgcggatatcagtaccgcgttgagtcgcctggcaggtaaagaacctatgctgaccnnnnnnnnnngaaaattcgtgaattaacccacgccgactggtcggcaagtaataaccgtatttctgaagatattaattggtttcccgggattagcctggaacacgcattacgcaacgggctattttgattgtcttgtttaaaggtgtgttaacgtttctatggtaaatcgtgaaatagtaatggattacatcctttcctgtttacaggatttggtcgaaaacggtgtggaaattaagcccgacagcgatctcgtcaacgatcttggcctggagtcgatcaaagtgatggatctcttaatgatgctggaagacagattcgatatttccattcctattaatattctgctggatgtcaaaacccctgcgcaattaatggaaactctacttccatggctggagaataaataatggggctatacgataaatatgcgcgccttgctggcgagcgactgcaatttagtgacaacgggttaacaccgtttggcacctgtattgatgaagtgtattccgccaccgaaggccggatcggcaataaaaaagtgattctggccgggaccaataattatctcggtttaacctttaatcatgatgccatcagcgaaggtcaggcagcgttagcggcccaaggcaccggcaccaccggttctcgtatggcaaacggcagttatgcgccgcacctggcgttagagaaagagattgccgagtttttcaatcgccctaccgctatcgttttttcaaccggttataccgctaatttaggcgtcatcagcgcacttgccgaccataacgccgtggtgttactggatgccgacagccacgccagtatttatgacgcctgttctctcggtggcgcggaaattattcgtttccgccataacgatgctaaagatctggaacggcgcatggttcgcctcggtgaacgggcgaaagaggcgattatcatcgttgagggcatctacagcatgctcggtgacgttgcgccgctggcggaaattgttgatatcaaacgtcgtctcggtggttatttgattgtcgatgaagcgcattcgtttggcgtgttaggcgcaacggggcgcggactggctgaagctgtcggcgttgaagatgatgtggatattatcgttggtactttcagtaaaagtctggcctcgattggcggttttgctgtcggttcggaagcgatggaagtgctgcgctacggcagccgcccgtatatttttaccgcctctccttctccgtcctgcattgcgaccgtgcgctcgtcgttaagaactattgccacacaaccagagctgcggcaaaagctgatggataacgccaaccatctgtatgacggtctgcaaaaactgggttatgagttaagttcacatattagcccggtagtgccagtaataatcggttcgaaagaggaaggtttacgcatctggcgcgagcttatctcgctgggcgtgtatgtgaatcttatcctgccgcctgccgcgcctgcaggcatcacgctgctgcgctgtagcgtaaatgctgcccacagtcgtgagcaaatcgatgccatcattcaggcatttgctactctgaagcagtaatgtgagcccgccgtggtgtttgcgccacggcgggtttaatgttgtctgtcataccaatacaccaggctcaacgccaccaacacaaacgctaccggtaaaccgagcgcggtaacaggtgcgcttaacgcaaatagcaatcccagattaaccatgatttgatagctgatccaggtgagtaagcccacgatgacgcctacagcgagacggctacccatcccaggcgaacgcggggcagtaaaggtaaacggcacagccagcaaaatcatcgccagggtcaggatgggttgccccagtttttcccacagtgcaaggcggtattcgctgctgggttgcccggtttcctgcaaataatggatgtaatgattaagctgacggacagaaaaagtattccccggcattgataactcttcaagattcatactggtgaaggccgattgccaggcaagattatctaatgtttccagcgtttctttgccattcagccattttttatgattcacaccatgcaggacccacgttttgtcgtctttaatggtggcactgcgtgcataaatgtaggattcaagcgagagatcgtcgcgataatgaaatatctccacgcccaccggctggccctgctcgttcagcgatttcaccgtcacaaattcattaccacgcctggcccacagcatattgccggtaatgtcatcgtcctcccccaacgcggtggcggtcgatttgatttgcaacgcctgttgctgcaatggcgacgccacccactcatctatcgcgcctaacgaaacagtccacaatatcccggcaaccagcgccaccagtgcaatacggaagatagaaaaccccgtgctgcgaatggcggtaagctcactgtttttcgataactgccccagtccaacaataccacccaataacgcgataaacggcgaaagttcgaccagtgtgcgcggtaaggtcattagcaccaccagcaccgcctgagtccagcgataaccgcccgggctgacatcatccagttcgttaatcaagttgaaggtggtaaaaagcggcagcaatagccctgcggcggcggcaaaaccgagaaagagatgacggattaaatagcgactgaaaacattcatcgggaaaatttctgcagcaaagagaagtcgcgtgcgaccagcatcagcaggcccattagcatgagtccgggcactaaccacaaaccaggaatgaggggaatcgcgccgttagccaccagcgtacggcagacgtcgccgccataaaaaatggcaataaacagcaacgtcagtggcaataacgttgaaaatcgcccttgccgcggttttacccgacttaatgaaatggccagcagcgccatcaacaatgctgtcagaccacggctttgtcgccattgcagttcggcatgatcggcaggaaagacggagcgcgccagctccgtgaccgatttcgctttgcgtttgacgttagggctttgaaccagcggattcagatgtaattgcagattacggtagatctgttcgttgtcgtcacgcccctgatgatcgagaagataggcagtgccgttgtgcaacataacggtcggtttctcgggtgatgggtcaaccacatcaaccgaacgggcgcggaaaatgcgggttcgattggcagtagaagtataaatcagcgcgtcagtcaggcgattattatcctgatcaaccgtctgcgaaaggatcattcgtccgttatcgttagtgttaaatttctttgcccgcaactggcgaacatccagctccgactgcgactgctgctccagttgataaatctgcgcataagcccacggacgaccatacatcgacagaagggtgacaaaaatacttagcggtatcgccagataaagaacggctttgtacaagcgtcccggactgccccccgccgcagagatagcggtaatttccgaatcggtatacatctgccctagcgtcacgccaactgacacatacagtccaacaggtaacaacatctccagtgcaatcagcacattgtagaaaacgatatccagcacaacatcaagagctaatgtcccatttgccgcttcggtcagataacgctgtgcggagtagctggcgaaaataaagatcagaaaaccgacgataatcagcaccagacggcgcgtaccacgcatgatgtagtgttcaaccagcttcatctcactaacgccctcaatcctttgaattttttattcattgatcagtttctgcgccagcgcaatgacatgatctacctcttccggcgtcaggctgccgtcctttgcccactgaatttgcccggctttattcagcaccagaatggttgaactctgctccggcaagcgccaggcaacgcgtccctgtccattgccgtcaataacgaattgcgcccacggatagcggcgtttatttttttcgattttgccaacaacaaaatagccagtaccaaagatggcatcatcggtgttcacaatggtggtgggctgaaaacgatcctgcggaaagtttgccgcttcaaccgctttaattaacagtgagttctttttcttcgccgacttacgcccggcgatatactggataatgcggacttttcccgccaattgtgtgctgttccacttttggtagtgaatttcgtcgtcgctattcagaagcagctcgccgccttcctgaatataaacaggggtaaccgttttgccagtgacgaaattgtgtgcctgcacacccggggctaaaagcatgataatcagcgcaataatcaaacgagatgacatcattgctccggttatagcggaaaacgcgaaatcagcagctctaagcgctgacgaatatcgctatccagcgccaacggtgcatcatacgactggcggttttccatatcatccgccaccatgtcgtcgtgtttatctcccatcaggccattaatggcggcgaggaaacgggaaatctgtaacgcctctttattttcaggatcaagcgatcttaaggtgtcgtaataagaaacctgttggctgatgatttttcgcacatcatgaaattccctgccggttagtcgcggtttggcaataatctctttcagggtatgcatttgcttttgccgataggcaataaaactgcttacgctttctaactggctatggcgtaatgaatagttcaccaacgaccagaccggagagcttaaataaatccgtaacaggttgccgtaatacgacacaatatttttcttaccgttacgaaagccgtcctgaaaacgcccaagaaaaacggtcgttttgccgaataaaaatccggcctgatgcttctttaaatacagccgttgcgcaaaacgcaggtgcttgtagcgcgctcgcatgtatttaaattgtttgcgctcatcagcagtcagctcatcgcctttggcttgtttgcgaactaaacgcagtaattcctgacgatcaacgccattgagccagaattgcaggcataacgcgtaattatcatgaatgatttcggtggtacaacttagtgcaatagtcggcggcaaactaacctgtgcatcaacgacatcatcttcttcaatcgcaacaaatagacgctcgctcgcctcaagcgggaaatattttctcatcatcaggatttctctccggctgcgttataaagcaaggaatggcgctgaaaaaatgcctttaaggttggaattaacgagagcgccacgtccagacattgcccaccgaagtaagcaaacgctactcccagcacaccaaacagatgacagaacatgaacagcaatacgatgtagccgattgaggcgatggtttgcgccacgagaaaagcgcgctgttttcccgccatcaatagcaatgactcctgagggaagcccagcatcgaaatcacaattgcgcccagcatcacctgaatcaggtcatacgcttcgagatacttaacgccaaacaccagcgaaatgagcggcttgccgacgataaacaccgcgagcgccaccagaataccgattccgcccgccagtaaaccggacttcacacctaacaaccacggtctggtggtgcgcggatctaaacgcatcacctctgggtaaaaacttttacccagcaaacccgctggcgttccggcggcgtcgaagaatgtcatggcgattttaaataacccggcggcagcgggtcctaacacgatccccaccagcactgtgctgcacgagttacgcgccgaccagatggagtgggcaatgttggttgaccagacaaaactccacgcgcctttgatgtgtcgggcagactcaaacagattcaatttgaaggcattatggatatttcggcggcgtaattcgcgcgcggcaaaccaccagtacatggtgccgccaaccagattcgacacgtaccaggcaataacaaaacccgcaaaaccaaagtcaaaataccaggctacgacgctccccgctgcgcgcagaaaaggtttcgtcgcctgctgtacagcaattaaatcgaagcgatctaccgcacgcagaatgccggtcggcgtggaggaagccattgaaggaatgagcgtgcaatagagcgctgccagccaaaaactttggtcatccagacctaatgaatgggaaaggaatggcagtaaggcaatgccaccgacaatcgccaccgcgccgctgacgatatccagcgagaaggaaaatgagacgacattgcgaaattggtgcggattattgttggtcaaggctggcgttccgtactgaaccaccagctgccatgtctgaaacttaataaaatcgctgatcgacttggcgtacgattgcacaatcaccagtacgccaaacatggcgggcgtcatccctttaccggcacacgagagcgccaacagccccagcaaggcgctcacgacattactggagcctaaccaggcgctattgcgaataatggtgcgaaacgcgccatctgcaaaccaatgtttgatgttaaaacccgccaattcagcctgaccttatcgttgatagtaaaaagtatcccgccagccttaagttaaacttcggcggtcagaaacgatggcaaccagagaaaccgccttctgtgcctgttccagcacttcgctgtagggcgctctggaatcaatctcaagaatttttgtgccgttatagccaatcttcgacatgacaccgattttgtcctgcagctcggcatagtcatggtcaggcttgcgggagatggcagtctcaatatcaatgcccaggcgaataattaattccgggcgatattgcgccatttgttggtataaacgccgttcgcgctgcgccagaaacatgctgattttcccggtcgcacgttcgacgccaatccccggtccgtcataataaaagcccgaaatttcagcctgcgggaagcgatcgctgaccaccagaacgccactttgcgccagtcgctgaaccttgcgtagattcgccattcttcgcagcgagaagcagtacataatcaccgccgcccatagcgccggagatttggttttcatgctttgggttttcgaggatttggccgccagtcgccgttccagccagacgccaaccaacggcaatcgtttgattttgtcgccgtcttcgccggagagcagccccagatagcgccgctcggtttgccagtgttgttgcagcgatttcaccaggtcggtggtcagtgtggatttaccggtgccatcacacccgaccaccgcaattagccccggaatgtagctgggctgcggcgcggttgtactaataacagtttgtgtttgtagtgcatccattcgttaaatcatcccctatccattttggtgatcaggaaagcgcggcgtgaattgcgcgtagtgacgcttgcagaatttcatcggctggttgccgaccatccagttcaaggatctttgcaccattgaatgtcagttgcggcgtaacggcgattttttcctgtaacgctgccagttggtggtcaggtttacgcgcaaacgccgtttgttcatcaatgccaagacgaatcaacaatacgggcaaataagatgccatccattggtacagcttcagctcgcgctgccttaacatttttatccaaccgttaccgcccgtggtttttgccaattgcgggccatcaaagcgaaaccccggcacttcaacctgcgggtagcggtcggtgatgagcagaaagccttgctggcttttacacaacattttgcgaaacttgtacgcccgccagcaggaaagcagatagataaccagtgcagtaatattgccaggcggtgttgagggcttttcgtgcacatgtgccgctttacttcgcagataacgcccaaaaggtgcgccaataacagggagctgtgaaatccattcgccaattcgcccggacgattgcccgagataaatgtgttctgttnnnnnnnnnnnnnnnnnnnnnnnnnnnnnnnnnnnnnnnnnnnnnnnnnnnnccagttcatttaccaggcttgccgtgagggtcgatttacctgaaccatcacatcctacaatggcaataacatgcactggcgtggaattaattattgacatattacgttgattcacgaaaaacccggcagtaaataatgtattgaatattacgtggtccgtgctcagaatatccgttcaaccttattgtgacaatggttaattgtgacattgacctgaattacgctttcataaaaacatattaaccaaataaatatttttaatggatatttaaattaaaggatatattcatgcagtcaataacacctccattaattgccgttattggtagcgatggttcaggcaagtcaacggtgtgtgaacatcttattaccgttgtcgaaaaatatggtgctgccgaaagagttcatttaggaaaacaggccggaaatgtcggtcgtgcagtgacaaaattaccgttgatgggaaaatccttacataaaacaattgaacgaaatcaggtgaaaacagcaaaaaaattgcctggaccagttccggcgctggtaattacagcgtttgtcgcccgtcgcttactgcgctttcgtcatatgcttgcctgtcgtcgtcgcgggttaattgttctaaccgaccgttatcctcaggaccaaattcctggcgcttacgatggtacggtgttcccacctaacgttgaaggtggtcgttttgtctcatggctggcaagccaggaacgtaaagcgtttcactggatggcgagccataagcctgatctggtcatcaaactcaatgttgaccttgaagttgcctgtgcacgtaaacccgaccataaacgggaatcgctggcgaggaagattgccataacgccacagttaacctttggtggtgcacaactggttgatatcgatgccaatcagccactggaacaggtgttggttgatgcagaaaaagcgattacggattttatgaccgcgcgtggttatcactagtcaaaaatggaaatgcccgatcgccaggaccgggcattttcaggaaggttaaatcaactgcaatgctatccagtacagcccaccagaaagaaaaattgccgccggtaaagtaaatacccacgccatcaggatgctggttaccgttttacgctgtaacccaccgccgtccaccaccatcgtccctgcaactgcagacgagaggacgtgtgttgtggagacgggcatcccaatataactggcaagaccgatagacactgccgccgtcatttgtgccgccatgccttgcgcatacgtcatgccgcgcttaccaatcttctcaccgatggtcatcgctacacgaccccagccaatcatggtgccaatgccgagcgccagtgctaccgccatgatgatccacaccggagcgtactcaatggtgcttaacatatcgctgcgcagttttttcagcaggttctggtcttctttactgacgcctggcagtttcgccagcttcgcggaggtatcagagatgcacagcataatgcggcgcagctggctgcgctgactcacgcttaacggctcgtaactttccatattgcctggcagcatcgttttaacgcgcgcaatcgcatcaaaggtatttgccggatgacagtgaaactctgttacttgcgtgccatcagtcgatgctgcaggcaatggaggttccatcgcaatcaacttctgcggcagttcaggatgctgttgcaggtagtgttcgaagttggtgacggcatcgcgggtacgggtaatttcatagccggacgcgttcatattgacgacgaagccagcaggggcaatccccaccagtaccagcatcaccaggccgatccctttttgtccgtcgttcgcgccgtgcgaaaacgccacgcccgcagcggaaacaatcagcgcaatacgcgtccagaatggcggtttacgtttgccttttttctttttgcgatcttccggaatgcggtgaatacggtcacgctttttcgtcccgctccagtagcgtcgcagcaggaatatcaggcctcccgcaatgaccaggccgacgataggggaaacaatcagcgaggagaaaattttggtcacttcacgcaggtttaacgcatccatcaccgatgagccggttaacagcgcgttggttaaaccgatgccgataatcgcaccaatcaaggtgtgcgaactggaggccggtaaaccgaagaaccacgttcccaggttccagataatcgccgccagcagcatggaaaagaccatcgccaggccgtgggttgaccccatattcagcaacaaatcggttggcaacatatggacaatggcataggcaacgctaagtccgcccaataacacgccaaaaaagttaaaaaatgccgccatcaccacagcaagttgtggttgcatggcacgagtataaataacggttgccaccgcattcgccgtgtcatgaaaaccattgattgcttcgtagaacaacacaaatgccagagcaagcaataacaaaagccctgtgtatatatcaaggccaacaaataaatttagcatatattagattacgccattttgaatttacgaacggacgcattatcagtgactttaacggcatgggcaaagtgaaatatca

SEQ ID NO: 288 - DNA, 13203 bp, Escherichia coli
  source 1..13203: mol_type = genomic DNA
atacagaactatctgtttatattttaatcaattaaatcaagtttaatacccttaaataacctgaaaatagccttaaataccccaataattaattttaaggctttccgtgttctctcctgcattatgaaaatgcaaaataaggcacaaaacaagctcacagacgcattaaacacacatcacctatacatccctataccaagcaatgaaaacagcgttagaatgcgtcctgttgcgttctggagattttcagaaatcctctctaagccatttcaactcactaaggagttttctttcttcgttctctcgttgctttcgctctagccaggcttttccctctggcgtagacaggaacttacgagcgtgaatcttgcggttattacgtttgatagctgcaatgtttttcatcgtgtgcctctgtattcatatgaaaattaacaagttacatactacacagggagactacgcataaaacacaatacaagtaaagatacattttcaagacaataggagccataaagcgcctttgatgggctaccccaaaaaataagcgccgtaggcgtatccactaaaaagggctttttcacaaaagctatgaagtcttagcagttcttctcttatcaggcacccgttgtactccggtggacgaaaccgtgctagagcttgattctttcccgatcaagttaggttttgaagaggtgggctttaatccactattgcacttaaaactcttcccatcatttagcctgtttatcctctgcaacgtctcacgacgtgtagcatcattggacaccgcgccaggtgtggaacatcttgctaagagttttggtagaaggtttagagacggtggcacgtcttccagcttcaaaggaacttgttacgaggttgagcctgggaactactcgcccatacgtgttacactaccaaagcccataacaacgtataggcgtttgtaagtgataacagaagatacaatttcttagagaagttaagctaagttattgattttcttgatggtgccgataataggagtcgaacctacgaccttcgcattacgaatgcgctgctctaccaactgagctatatcggccctgaaaggacatgttcacgaacgtgaatcacggtggacaaggttaaaactaaccgggcgatgcgtcaatggccttgtgaatcaaatggctacttttgcatcacccggttttatttacgcacgaatggtgtaatcaccaataccgatccacttgtaagtggtcagtgcttccagccccattgggccacgcgcgtggagtttttgtgtgcttaccgccacttccgcacctagtccaaactggccgccgtcggtaaaacgcgtagaggcgttaacgtaaacagcggacgaatccacttcgttaacaaaacgctgggcgttgcgcatatcgcgggtcaggatcgcatcggagtgttgtgtgccgtgttcacgaatatgggcgatggcatcgtcaagatcactgacgattttgacgttcaaatctaatgacagaaactcatcgtcatactcttccgctttaacagccaccaccttcgcggggcctgtctgcaactgcgccagcgcagctgcatctgcgtgtaatgccacgccgctttcctccatttgtttgcttaatgcgggcaggaagctatcggcgatgtttttattcaccagcaacgtttctaccgtattacatgtgctcggacgctgagttttcgcgttgacgatcacttttaatgcttcagcaatctctacactttcatcaacataaatatggcatacgcctataccacctgtgatcaccgggatcgtcgactgttcgcggcacagtttatgcaaaccagcgccaccacgcgggatcagcatgtcgatgtatttatccatacgcagcatttcactgaccagcgcacggtcaggattatcaatcgcctgcacggcacccaccggtaagccacaggatttcagggcgtcctgaatcaccgccaccgttgccgcgttagtgcgacaggtttctttaccgccacgcagaatcactgcgttaccggttttcaggcacagcgaagcgacatcaaccgtcacgttcgggcgcgcttcataaatcacgccaataacccccagcggtacgcgacgacgctcaagacgcaggccgctgtccagtacgctgccatcgattacctgccccaccggatcggcgaggttacacacctggcgcacatcatcggcaatgcctttcagccgtgcgggcgtcagtgccagacggtcaagcatcgcttcgccaaggccattggcacgcgcgtcagcaacatcctgggcgttagcgttgaggatgatttcgctttgtgcttccagttcatcggcgattttttccagcacgcgatttttttcgcggctggagagttgcgctaatttatacgaggcttgcttcgcggcaatgcccatttgttccagcatcagcctgctccttaacgggtaatcatgtcatcacggtgaacggcaaccgggccgtattcatatcccagtattgcatcaatttcttgcgagtggtgcccggcaatacggcgtaatgcatcgctgttgtaacgactgacgccgtgggcgatatcgcgaccttcgaggttgcaaatgcggatgacttcaccacgcgagaaattgccagtcacgcttttaatgcctttcggcaacagggagctgccgcgttcaagaatggcggcagttgccccttcatctaccgtgatttcacccgccggcggcgcaccgaaaatccagcgtttacggttttcaagcggagtcgcctgggcatggaacagcgtaccgacggaaatgccttccatcacatcaccaataacgcccggcttgctgcccgcggcaataatggtgtcgatacccgcacggcaagccacgtcagcggcctgcaatttggtactcatgccgccagttccgaggcctgaaacgctgtcaccggcaatcgcgcgcagtgcgtcatcaatgccgtaaacatctttaatcagttctgcctgcggattgctgcgcggatcagcggtatacaaacctttttgatcggtcagcagcaacagtttatcggcacccgccagaatcgccgccagcgcagaaaggttatcgttatcgccgaccttaatctctgccgtagcgacagcatcgttctcattgattaccggaacgatattgttatcgagcaacgcacgcagggtgtcgcgggcgttcaggaagcgttcacggtcttccatatcagcacgggtcagcagcatctgcccgacgtgaatgccataaatcgaaaacagctgttcccacagttgaatcagtcgactctgccctaccgccgccagcagttgtttcgaggcgatagtcgctggcagttccgggtaccccaggtgctcacgtccggcggcgatcgcgcccgacgtcacaataacaatccgatgcccggcggcatgtaactgcgcgcactggcgaacaagttcaacgatatgggcacggttcagacggcgcgatccgcctgttagcacactggtgccgagttttaccaccagcgtctggctgtcactcatgattctctgccattcaattttaggaaaaatgatatcaaacgaacgttttagcaggactgtcgtcggttgccaaccatctgcaagcaaagcatggcgttttgttgcgcgggatcagcaagcctagcggcagttgtttacgcttttattacagatttaataaattaccacattttaagaatattattaatctgtaatatatctttaacaatctcaggttaaaaactttcctgttttcaacggggctctcccgctgaatattcgcgcgttaattaaaatcaggaatgaaaatgaaaaagagcactctggcattagtggtgatgggcattgtggcatctgcatccgtacaggccgcagaaatatataacaaagacggtaataaactggatgtctatggcaaagttaaagccatgcattatatgagtgataacgacagtaaagatggcgaccagagttatatccgttttggttttaaaggcgaaacacaaattaacgatcaactgactggctatggccgttgggaagcggagtttgccggaaataaagcggagagtgatactgcacagcaaaaaacgcgtctcgcttttgccggattgaagtataaagatttgggttctttcgactatggccgtaacctgggcgcgttgtatgacgtggaagcctggaccgatatgttcccggaatttggtggcgactcctcggcgcagaccgacaactttatgaccaaacgcgccagcggtctggcgacgtatcggaacaccgacttcttcggcgttatcgatggcctgaacttaaccctgcaatatcaagggaaaaacgaaaaccgcgacgttaaaaagcaaaacggcgatggcttcggcacgtcattgacatatgactttggcggcagcgatttcgccattagtggtgcctataccaactcagatcgcaccaacgagcagaacctgcaaagccgtggcactggcaagcgtgcagaagcatgggcaacaggtctgaaatacgatgccaataatatttatctggcaactttttattctgaaacacgcaaaatgacgccaataactggcggctttgccaataagacacagaactttgaagcggtcgctcaataccagtttgactttggtctgcgtccatcgctgggttatgtcttatcgaaagggaaagatattgaaggtatcggtgatgaagatctggtcaattatatcgatgtcggggctacatattatttcaacaaaaatatgtcagcgtttgttgattataaaatcaaccaactggatagcgataacaaattgaatattaataatgatgatattgtcgcggttggcatgacctatcagttttaatgattattgccggatgtgatgcatccggcacatttcactcacgccgttaacttcaccggctcgtcacgaaaatcatccgccggttccagcttcagattcagcgtcgtcagcagttcacgcagcttctcgtgaaactcacgcagggtgtgctccagtcgttcaaccacttcagtgtcttttaccggaacgctcttccagtcgcctgctttatcgaacagaccaaactggtagctgtaggtaaaacgggattcctgcgcttccagctccatccaccagccccagaattcacgcacttccggtgccggtttcacgttgacgcatacagccagacaatcgaaaaagaatcgattatcttcgcacttaccttcacgaatatacgggcctagtgcggtaaattttttgatcaatctgctcttcgggtgtccactcggtaacgtcattgctatctcctgttgtgatgcaactgttttaccaaattggcaaaatttagcaaatttttaacacaagcgtttttcgatccagccggtgatttcctgaagacctttgtcaaaattccgatacaccgggttaaatgggatctctaataatttaccgtcagcagatgatgaggtgattaagcgtgagtcctcttccgggctgaacggatcgttcttccagtagcctgataacattggcgttgggcagcgacgtcccagcaatccttgcacttttaatgaatagcgattcagctccacgcgcaacgcgtcatcggaagcatcatgcatccccaaacgactcgccagaacgtcaagatacatttccggcacctgttgctggcacttaaaatcactcaacagggtatgaactaccggaccaagacaggcaaccgctttcagacgcggcgattcaaggtatgccagacgcacggcaacgttagcgccgaaacggaaaccaaaggccgcgacgcgagtgtgatccacccacggtacgttaggcagcgcctttaagacgtgctgatgcaacaggctggagtcctgggtgagcttccattttgaagaaaagcccaccgacggcatatcaatagtcagcatcgcaatgccgcgcggcgcaaaataacgttcatacaggctgtaatagtccgtctgcatcgcatccagaccaccacacattaatactgtcgggaacgggccatcgcctttcggcatatgcaaaaagccggtgatgggcgcaccgccgggtacggtaaactccatctgccgcatcgtgcccggcagacgctgggcggcctcttcataggcgcggtttgataaagcctgcgcttgctcggccaggtcatctcctttcagatgaggataggcggcaatgttgtacaacgtagccgcatgcagccagtgtcgaccactgagttgcggatcttcttccgcacaggctttttgttgccacaccatcgcctgggtggcccactcataaatccagttgccaccacggtagccaatcacggtatcgtataaatcatcatcggtacgttcagcatcgctcatcacaatacgtgcctggacgtcgaggatttcacgtgggtcaatgccgcgccagatccacatcagacggttaatcatgcgataccagtgagggatggttttaccatcaagggccgactgcacaggcggttgtgcgccgtgattaaagcggcggactagcgtcgaggtttcaggatgtttaaagcggggtttgaacagggtttcgctcaggtttgcctgtgtcatggatgcagcctccagaatacttactggaaactattgtaacccgcctgaagttaaaaagaacaacgcccggcagtgccaggcgttgaaaagattagcgaccggagattggcgggacgaatacgacgcccatatcccacggctgttcgatccaggtatcttgcgggatatcaacaacataattatcaaccagcggacgaccagccggttttgcaaagatggtgacaaagtgcgcttttggatacatttcacgaatcgcaaccgcagtaccaccggtatccaccaggtcatcaataacgatgaagccttcgccatcgccttctgcgcgtttcagcactttaagctcgcgctggttgtcgtgatcgtagctggaaatacaaacggtatcgacatgacgaatacccagttcacgcgccagtaacgcacccggtaccagaccgccacggcttacggcaataatgcctttccattgttcagaaggcatcagtcggcttgcgagtttacgtgcatggatctgcaacatgtcccaggtgacgatgtatttttcgctcatgtgaagtgtcccagcctgtttatctacggcttaaaaagtgttcgaggggaaaataggttgcgcgagattatagagatctggcgcactaaaaaccagtatttcacatgagtccgcgtctttttacgcactgcctctccctgacgcgggataaagtggtattctcaaacatatctcgcaagcctgtcttgtgttgacaacattttctgctaaccctgtgacctgcaatactgttttgcgggtgatcgacaaggagacttaacgtgtctgaactgtctcaattatctccacagccgctgtgggatatttttgccaaaatctgttctattcctcacccgtcctatcatgaagagcaactcgctgaatacattgttggttgggcaaaagagaaaggtttccatgtcgaacgcgatcaggtaggtaatatcctgattcgtaaacctgctaccgcaggtatggaaaatcgtaaaccggtcgtcttgcaggcccacctcgatatggtgccgcagaaaaataacgacaccgtgcatgacttcacgaaagatcctatccagccttatattgatggcgaatgggttaaagcgcgcggcaccacgctgggtgcagataacggcattggtatggcgtctgcgctggcggttctggctgacgaaaacgtggttcacggcccgctggaagtgctgctgaccatgaccgaagaagccggtatggacggtgcgttcggcttacagagcaactggttgcaggctgatattctgattaacaccgactccgaagaagaaggtgaaatctacatgggttgcgcggggggtatcgacttcacctccaacctgcatttggatcgtgaagcggttccagctggctttgaaaccttcaagttaaccttaaaaggtctaaaaggcggtcactccggcggtgaaatccacgttggcctgggtaatgccaacaaactgctggtgcgcttcctggcgggtcatgcggaagagctggacctgcgccttatcgatttcaacggtggcacactgcgtaacgccatcccgcgtgaagcctttgcgaccattgctgtcgcagctgataaagtcgacgccctgaaatctctggtgaatacctatcaggacatcctgaaaaacgagctggcagagaaagagaagaatctggccttgttgctggactctgtagcgaacgataaagctgctctgattgcgaaatctcgcgatacctttattcgtctgctgaacgccaccccgaacggtgtgatccgcaattccgacgtggcaaaaggtgtggtcgaaacctccctgaacgtcggtgtggtgaccatgactgacaataacgtagaaattcactgcctgatccgttcactgatcgacagcggtaaagactacgtggtgagcatgctggattcgctgggtaaactggctggcgcgaaaaccgaagcgaaaggcgcatatcctggctggcagccggacgctaattctccggtgatgcatctggtacgtgaaacctatcagcgcctgttcaacaagacgccgaacatccagattatccacgcgggcctggaatgtggtctgtttaaaaaaccgtatccggaaatggacatggtttctatcgggccaactatcaccggtccacactctccggatgagcaagttcacatcaaaagcgtaggtcattactggacactgctgactgaactgctgaaagaaattccggcgaagtaattatttgatttgctgccggatggcgtttaatcgccttccggcagtttcatccttcattatccttcgataaaagccatccctgtaaatgtccgtcgcgggttgccacgttcaatctggtgatggaacattcgccgctgcgatttcagcgccgcgctattttcctgttgctgctgctccagcttccaggcaatcagcaatcgcgccagccgtttgttagcatgcccagaaaccagtttttgcgcccatgatgagaccgatacggactcggacaaatccactgaatagtgccgcaccagctttcgcttaatgcccatgcgttatcgccatccagagaaaccagcgccgaacgcagcgtgtcagagtagcggcccgtttctgtttccagcaccgttaccgcgacgtcttgccggataaaaacgaccaacagagaagaacgctgcgccaatcggatagccgcgtccgggatgtaaatctggcatccccactacgcgctgcatgttgggtaaatttgccgtggtgtgtaattgttggatcgctaaactctcgatccacaggtcatcagatgcgatggtaaataccgcatcggataagggacgaatatatttgcccatgtaccattccatttatactcgtcatacttcaagttgcatgtactgcgactgcgttcgttcaccccagtcacttactttagtaagctcctggcgattcactcgcttgtcaccttcctgcaactcgaattatttagagtatataaatattaaaaatcaggaaatggcagacgaatccagggcaagaaaaaaagaattaatcctggaaaggtctgcaaagagtcattgataaaggatttgtcatgatttacctccttgcagtttgtggaataagaaaacgcgcacataccaggcgggcgttattttcattgcaagctggatttaatgttgcggtttatatcgcatataaaaattagtaaaccacgctccccggcattcaacgtgctgctgcttaactatctgaaaaccataacgttcaaaaaagggttttgcggttatgctggcgtccaccgtaagttcggattcagacttaatcaaaggttttaacaaggcgctggcaaccccgcggcgggtgtattcagggtcaacaaataacatatcgatatgacgttcaatgcgggaaataaaaccaaccggttgtgcattaatgactgcaacccgcacttgtgatttcgcgagtttctccttccagcgagattcgtcaatctgcgcccaggcggcaatttgttgtggtgaataatgctgactggcggtcatcataaccgctctaatgaaaatagcgcatagttgctgaaaatcgccaggctgatagtttcttatttgtatgttattcataatcccagcaccagttgtctttccatttgagggtcaagcaacgtcacatgcagccccaccagtcgcacaccgcgcccgccgcggcgttcatcccaggttttacgcgcggtggcgattagatcagctttattcagccgcggccagacgtgctcctgggtggtttgctgaaaatcgtcgaactttaatttcaccccctggcgagcaatcagtaaatcaggttttacctttgccagacggcgttcaagttccggatacagccgctcgataatcgcttcacattcagaccagtgatgaatatcttccgccatcgtgcgttccacaccgacggattttcgcaaccgttcgctgttaacgtcgcgttcgtcaatcccctgactacgctcccacaaaatgcggccaaatttgccaaagcgtttaagcagaatcaccagatcacacttttgcacatcaccgcaggtccgcagccccatcgcttccagttttgccgccgagactttgccgacgccggggatttttgccaatggtaaggtttgcagaaatgccggaacttctgccggagtaatcacaaactggccgttgggtttattcatgtcggaggcgattttggcgagaaacttgaccggcgcaacgcccgcagacgccgtcaggtgcagctcgttgaaaatcgtctggcggatttcctgggcgatgagggtcgcagaaccgtggcaatggacgctatcggtgacatcgagataagcctcatccagtgacaacggttcaatgcgcgaggtgtagcgcgagaagatttcacggatatgatttgaggcttctttgtaggcgtcaaagcgccccggaagcaaggtgagatgtgggcataatttgagcgccatcccagtaggcatagcgctacgtacgccaaatttacgcgcgggataattggcggtgctgatcaccccccgacgttcgcggctgccgccaatagcaatagggatatcgcgcagggcgggattgtcgcgcatctccactgcggcgaaaaagcagtccatatccacatgaatgattttacgcattgctcacctctcaacactggtaaagtatacagtgatttcagggtttgagaaatgcgtaaagattcagcatttagcgcattcgctgcgaaagcacctgctgcttatccagcttttgcaccagcggctgcaccactttatccccatgctgaccaaagtattgatacagcgtatcggacgcacttttggtcagcaccataatctcaatacgccgattgcccgcgctttgcggatttttggcatccagcagcatctggtccgccattgcgcttacctgcatcactttatcttccggcattccggcctcttccagcacccgacgagctgaaagcgcgcgatcgcccgaaaggttccagttgttgtagatattgtttttgtaggccatcgcatcggtatgcccggtaataataattttgttatcgagcgagtcgaacactggcgcgagctccaccagcaaagttttaaagaacggcataatctgcgcgctgccgcgttcgaacatattgcggttctggtcatctttaatcagcacgcgcaatccctggggaacaatctccatctccagattcgcttccatatgcgcatcacgggcaatggtgttgatactggttgccagctcgccaagctcggtggcggatttcttcttcagcagcgctgttttctcgttgacgtctcgcgcttttttctccgtctcttccggcaccgccacggtggcaggttttggcggatgagacgggctgattttatttaacggcgacaatccgccgccactgaaaatcgactgcccgtgcagcgcggcgataatgctttcacgctcggatttactgacgctgttgacaatcaactttatcgtcgtcaccaaaggggccgagcgtatttccgaggtttctgcccgctttaccctggacgcgatgcccggcaaacagatggcgattgacgccgaccttaacgccgggttgatcaaccaggcgcaggcgcaaacccggcgtaaagatgtcgccagcgaggccgatttctacggcgcgatggacggggcgtcaaagtttgtgcgcggggatgccatcgccgggatgatgattctggcaatcaacctgatcggcggcgtctgtatcgggatcttcaaatacaacctgagcgccgatgctgccttccagcagtatgtgctgatgaccatcggcgacgggctggtggcgcagatcccttccctgctgctctccaccgcggcggcgattattgtcacccgcatcagcgacaacggcgatatcacccatgacgtgcgccaccagctgctggcaagcccgtcggtgctctacaccgctaccgggatcatgttcgtgctggcagtggtgccggggatgccgcacctgccgtttttgctgttcagcgccctgcttggctttaccggctggcggatgagcaaacgcccgcaggcggcggaggcggaagaaaaaagcctcgaaacgctgacccgcaccatcaccgaaaccagcgagcaacaggtcagttgggagacgataccgctgatcgagcctatcagcttaagcctcggctacaagctggtggcgctggtggataaagcgcagggcaacccgctcacccagcggattcgcggcgtgcggcaggtgatatccgacggtaacggcgtgctgctgccggagatccgtattcgggaaaacttccgcctcaagcccagccagtacgctattttcatcaacggcattaaggctgatgaagcggatattccggcggataaactgatggccctaccctccagcgaaacctacggcgaaattgacggcgtgctggggaacgacccggcgtacgggatgccggtgacctggatccagcc

SEQ ID NO: 289 - DNA, 13102 bp, Escherichia coli
  source 1..13102: mol_type = genomic DNA
tactgccggaatggccttccaaccgagttgatgaactcctgccatggaacgtagtactcaccaataaataagcgtcaatacggtgctccgttgacgcttaccggtaccggcatgtcgacttcaaccatgattgcacacaagctgcaagagttcctgactgaacagggcatttcagccactaccgcccaatgctgtctgaatgagatccctcttaactgtaacggtatggaccttattgtaacctccatgcgaaccaacagtgattacggcatccctacgcttaatggcgccgccctgctcacagggatcaacgacgacgcgttaaaacaacaaatcaaggctctgttaactcaataaaaggaggcattatgtttgattacatcctgtctctcggcggtaccgttttcgtccctatcatcatgatcgtgattggccttatcttccgcatcccctggctgcaggcgattaaggcaggggtaacggttgggattggttttgtcggtatgggactggtgatcgtcatggcgatcgacagcctcagtccccctatcaaagtgatgattgagcgtttcggcctagccctgcatgtctttgacgttggcgcaggccctgcctccggcgttggttatgcgacagccattggcgccatgattatcccagttatttttcttctcaatgtcgccatgctggtcacccgtctgaccaaaacgatgaacgtcgatatttacaattactggcactacgccattacgggtacggtggtccagcttatgaccggtagcctgatttatggtgtgctgggggcaatctgccatgcggcgctatcgttaaaaatggccgactggacggcaaaacgggtacagaacatcgtcgggctggaaggtatttcgataccgcaaggctacggttccagttcagtaccgcttttcgttctacttgatgctatctatgaaaaaatccctttcatgaagggacgcaatatcgatgctcaggagatccagaaacgctacggcatggtcggcgatccggtgattatcggcgtagtgctcggtctgatttttggcctggcggctggtgaaggctttaaaggttgcgccagtctgatgattaccgttgcggcaatcatggtgttgttcccgcgcatgatccgcctgattgttgagggcctgctgcccatctccgacggtgcaagaaagttcttccagaaatatttcaaaggacgtgaagtgtatatcggtctggatactgctgtgacgctggggcatccaaccaccattgctgtcggtctgctactgatacccattatgttaattctggccagcattttaccgggcaacaaagtgttacccctcgcagacctgccggtagcaccgttctttatctgtatggctacggttatccaccgcggagacctggtcaggacgttgataagcggggtcatcgtgatgattaccgtcctgctgatcgccacccagttcgcgccttacttcactgaaatggcgctcaaaggcggtttcagttttgccggtgaaagtgcgcaaatctcagcgttgtccgtgggcaatatgttcggttggtcgatttctgaattgatgtcgcttgggattattggcgttgtcgtggcggtcggtattgtcgccagcgtcgtgctgttcttacgtaaacgtgaattatcggaataaggagtactttcaatgagttggctgaaagaggttattgggacggaaaaagcggtcatcgccatgtgccatctacgtgcattgcccggcgacccgagttttgatgcgcagttggggatgaactgggttatcgacaaagcctgggacgatctgatggcgctccaaaatggtggggtggatgcagtcatgttctccaacgagtttagtcttccctatctcacgaaggtgcgtccggaaaccactgcggcaatggcacgaatcatcgggcaattaatgagcgatatccgcatcccgtttggcgtgaatgttctgtgggatccggtcgcctcattcgacctggcgatggctaccggcgctaagtttatccgcgagatatttaccggtgcctatgccagcgactttggcgtctgggacactaacgtcggtgagaccatccgtcatcaacaccggattggtgcaggcgaagtgaaaaccttgttcaatatcgtcccagaggccgccgtgtatctgggcaatcgcgatatctgttctattgctaaatcgacagtatttaacaaccatcctgatgcgctctgtgtttctggcctgaccgccgggacgcgtaccgacagcgcgctgttaaaacgggtcaaagaaacggtgcctgacaccgtcgtgttggccaacacgggcgtctgcctggaaaacgtggaggaacaactcagtatcgccgatggctgtgtgaccgcaaccacctttaaaaaggacggcgtttttgccaatttcgttgaccaggcgcgagtcagtcagtttatggagaaagtgcatcatatacgccgataagatggggataagcagagcgcttatccccggcaaagagcaataacccttctgcgatccctgccgccttcgtcaaaagtatcgacggggatcgctaccagattaacccgaatcggcatggagtcaacgacggatgattaacgatattaaatgggtacaggcacaacgtaaagccaccgactggcgtcaggccgtggaaatcgccacccgcccgctggtagcctatggtgccgcgcagccatgctacgttaatgggatcatcgaaaatacccttaactgggggccttattatctgatagccccaggaatcgccttgcctcacgcccgaccagagcaaggcgcaaactataatcaggtcagtatcaccacgctacgcaccccggtcgcctttggtaacgaggagtgcgaccccgtctggctgcttctctgcgtcagcgccacggatgccaacgcacatattttgaccattcagcgcatcagccagtttattgattcgccacaacgcttaacggcagtgggaaatgccagcacagacgatgcactgtttgcgctggtatcaggttaacggaggcgcttatgatcctgcacccttctctcgccagcgcaaatcctctgcactatggtcgtgagctgacggcattggacaatctggattttgggagcctgcatctggatattgaggacagcagcttcattaacaacattacgtttgggatgaaaacggtgcaggccgtcgccagacagacgcctcatcccttgtcctttcatttcatgcttgcccggccacagcgctggtttaacgcgctggctgaaatcagacccgcgtggatcttcgttcatgcagaaacgctggactatccttcggaaacgttaactgagatccgccataccggcgcacgagccggactggtatttaatccggcaaccccgatcgacgcctggcgatatctggcgtctgagctggacggagtgatggtgatgaccagtgagcccgatgggcagggacagcggtttattccctccatgtgcgagaaaatccaaaaagtacgcacggcttttcctcagaccgagtgctgggccgacggtggaattacgctggcagctgcacagcaactggcagcagctggggcgcaacatatggtgattgggcgcgccctgttctcttcatctgactatcgcgcgaccttagctcaattcgccaccctgtaagaggagattgtttctgatgagccaacagagacctgaccgtatcaaacagatgctgcactacctgtggcaacatcgtcacctctccacacagcaggccatggagctttttggctatgcggaagcgactgtccgtcgtgatttccagtatattgtcaaccagtatccaggcatgatccgcggtcacggttgcctggacttcgacgacagtacagacgacaaagagtacgtcttcgacgtgaaacgtacattgcaatctgtggcgaaaagagaaatagctgcccttgcccgaacaatgatcaaagatggcgactgcttttttctcgactccggctcaacctgccttgaactggcgaaatgcctggccgatgcgcgggtaaaggtcatctgcaacgacattaaaatcgccaatgaactgggctgttttccccatgtggaaagttacattatcggaggactgattcgcccaggttatttttcggtaggagagagtctggcgctggagatgatcaatgccttttccgtagaacgtgcgtttatctcctgcgatgcgctgtcgctggagacggggatcaccaatgccaccatgtttgaggtcggggtgaaaacacggattattcaacgctcgcgtgaagttattctcatggccgatcactcaaaatttgatgccgttgagccgcatgctgtagcaacactatcatgtattaaaacgatcatcagtgacagcgggttacctgagactattgcacagcgttatcagcgagccggatgtcagttgtttttacctcattcaataaagtgataagtaagttcattcgagagggatttcaagcaaaaataatcaatggcacccaatagaaaatattggcgatgcgctcgaacgaataaagaagctctaggcgcaatccacacactacgatgttgcaacaacacgccatctactttttattctcattcactaaatgtggctgttctggattcattattcaaagtgtgtacaagatcacatttaatcacatcattacggttcagcatgctgaacaaagcatattttccactatgtaatgccgataccatttattccatgagcaaggaggagccattatggttcgcaaagggtgtaattcattagtccgtgctgaaaaaatattaacccacattgcatgggttggtatggcaagttatatggagttattaaataaattccagtaccccaaaagcagcctgcttaatttattgaatgtaatggtggattgtggtttcttannnnnnnnnnacggctactattcactgggaataaaaaactacgaattgggttgtcaggcgttacacaccgtcaaaatatatttgaggtgactaagcggccaatgcaggagttgtcgctgaaaagtggactggtttgtcatcttggggcgatggagagcatttcggctatctatctcgacaagatcgaaagtccggactctgtaccgacgagcaaaagctggattggcaaaaaacttgagttgcatattaccgcgttgggtaaggcattattagcctggaagacacgagaagaactggattattttttagaagcactcacgttaactccacatacgcgcaatacatttaccgataaaaaattgtttctggaagaattacaaaaaacacgccttcggggatgggccatagacaacgaagaatcaacctatggggcggtatgtttaagtatgccggtattcaatatgtataacagagttaactatgcaatctcactttctggcgatccggtagtttattcaggaaataagatagacagctatctggaattgctccggaaatgcgctgagcaaatatcatatgggctgggatacagaaacgaaaatgagcacttacgaaaaggaaactgaggtaatgaaaaaattcagcggcattattccaccggtatccagcacgtttcatcgtgacggaacccttgataaaaaggcaatgcgcgaagttgccgacttcctgattaataaaggggtcgacgggctgttttatctgggtaccggtggtgaatttagccaaatgaatacagcccagcgcatggcactcgccgaagaagctgtaaccattgtcgacgggcgagtgccggtattgattggcgtcggttccccttccactgacgaagcggtcaaactggcgcagcatgcgcaagcctacggcgctgatggtatcgtcgccatcaacccctactactggaaagtcgcaccacgaaatcttgacgactattaccagcagatcgcccgtagcgtcaccctaccggtgatcctgtacaactttccggatctgacgggtcaggacttaaccccggaaaccgtgacgcgtctggctctgcaaaacgagaatatcgttggcatcaaagacaccatcgacagcgttggtcacttgcgtacgatgatcaacacagttaagtcggtacgcccgtcgttttcggtattctgcggttacgatgatcatttgctgaatacgatgctgctgggcggcgacggtgcgataaccgccagcgctaactttgctccggaactctccgtcggcatctaccgcgcctggcgtgaaggcgatctggcgaccgctgcgacgctgaataaaaaactactacaactgcccgctatttacgccctcgaaacaccgtttgtctcactgatcaaatacagcatgcagtgtgtcgggctgcctgtagagacatattgcttaccaccgattcttgaagcatctgaagaagcaaaagataaagtccacgtgctgcttaccgcgcagggcattttaccagtctgaggagaaactcatgtctgttcgcaatatttttgctgacgagagccacgatatttacaccgtcagaacgcacgccgatggcccggacggcgaactcccattaaccgcagagatgcttatcaaccgcccgagcggggatctgttcggtatgaccatgaatgccggaatgggttggtctccggacgagctggatcgggacggtattttactgctcagtacactcggtggcttacgcggcgcagacggtaaacccgtggcgctggcgttgcaccaggggcattacgaactggacatccagatgaaagcggcggccgaggttattaaagccaaccatgccctgccctatgccgtgtacgtctccgatccttgtgacgggcgtactcagggtacaacggggatgtttgattcgctaccataccgaaatgacgcatcgatggtaatgcgccgccttattcgctctctgcccgacgcgaaagcagttattggtgtggcgagttgcgataaggggcttccggccaccatgatggcactcgccgcgcagcacaacatcgcaaccgtgctggtccccggcggcgcgacgctgcccgcaaaggatggagaagacaacggcaaggtgcaaaccattggcgcacgcttcgccaatggcgaattatctctacaggacgcacgccgtgcgggctgtaaagcctgtgcctcttccggcggcggctgtcaatttttgggcactgccgggacatctcaggtggtggccgaaggattggggctggcaatcccacattcagccctggccccttccggtgagcctgtgtggcgggagatcgccagagcttccgcgcgagctgcgctgaacctgagtcaaaaaggcatcaccacccgggaaattctcaccgataaagcgatagagaatgcgatgacggtccatgccgcgttcggtggttcaacaaacctgctgttacacatcccggcaattgctcaccaggcaggttgccatatcccgaccgttgatgactggatccgcatcaacaagcgcgtgccccgactggtgagcgtactgcctaatggcccggtttatcatccaacggtcaatgcctttatggcaggtggtgtgccggaagtcatgttgcatctgcgcagcctcggattgttgcatgaagacgttatgacggttaccggcagcacgctgaaagaaaacctcgactggtgggagcactccgaacggcgtcagcggttcaagcaactcctgctcgatcaggaacaaatcaacgctgacgaagtgatcatgtctccgcagcaagcaaaagcgcgcggattaacctcaactatcaccttcccggtgggcaatattgcgccagaaggttcggtgatcaaatccaccgccattgacccctcgatgattgatgagcaaggtatctattaccataaaggtgtggcgaaggtttatctgtccgagaaaagtgcgatttacgatatcaaacatgacaagatcaaggcgggcgatattctggtcattattggcgttggaccttcaggtacagggatggaagaaacctaccaggttaccagtgccctgaagcatctgtcatacggtaagcatgtttcgttaatcaccgatgcacgtttctcgggcgtttctactggcgcgtgcatcggccatgtggggccagaagcgctggccggaggccccatcggtaaattacgcaccggggatttaattgaaattaaaattgattgtcgcgagcttcacggcgaagtcaatttcctcggaacccgtagcgatgaacaattaccttcacaggaggaggcaactgcaatattaaatgccagacccagccatcaggatttacttcccgatcctgaattgccagatgatacccggctatgggcaatgcttcaggccgtgagtggtgggacatggaccggttgtatttatgatgtaaacaaaattggcgcggctttgcgcgattttatgaataaaaactgaaagcataaataaaaacatccagacacctgaattatccgactctgcatcattcgttatttgctcagtcggataatgatgggtcgctaccctgttatgagaggacgttatgccactaattatcgttgtggcagggattgctttactcctgcttttaaccataaaaattaagcttaatacgtttgtttcgttaattattgtctcgattgctgtcgccatcgccagtggtatggatttgagtaaagtcgtcacctcagtcgaatccggacttggcggtacgctgggccatattggtttgatatttggcttcggtgttatgctcggtcgcttgctggccgatgcgggtggtgcgcagcgaatagcgctgaccatgctgaattatttcgggaaaaataaacttgactgggcagtggtctgttcggcgtttattgtcggtatcgcactttttttcgaagtcggtttaattcttctggtacctattttattcgctattgcccgtgaagcaaaaatatcaccgatgtttatgtgtgtgccgatgctttctggtttgctggtcgcacacggttttttgccgccgcaccccggcccgactgttatcgccagggaatatggcgctgatgtaggattggtactgatatacggtatcattgtcggcattccaacctttattctttgcggcccggtattgaataaattctgccagcgcattattccggacgcctttaaaaaagaggggaatatagcctctctcggcgcgacccgccgattcagcgaaagcgaaatgccaggctttgggatcagttttctcacggcaatgctgccggtgatcctgatggcggttgtcaccatcatccagatgactcatgccaaaagtgccgcggattcaggcttattttacaacgtgatactgttcttaggtaattcaacgatcgccatgctgatttcactgctattcgcgatctataccatgggcctggggcgcgggaaaacaatccctgacctgatggattcttgcggaaaagctatcgcgggtattgccggtctgctgctgattatcggtggtggtggtgcattcaagcaagttctcatcgactctggcgttggtcagtatatttccaccctggtttcgggtatggatattaacccgatcctgatggcctggggcgtggccgcattcctgcgtatttgtctgggttcagccaccgtcgcggcgatctctaccgccggtctggtcatcccattgttggcagtacatcccaataccaacctggccttgattacgctgtctaccggtgccggatcctgtatttgttctcacgttaacgatgccagtttctggatgattaaagacttttttggcctgaccaccaaagaaacgctgttatcctggacgctgatgtccacactcttatccatcagtgggctgatttttattctgctcgccagcttagttttataatcgggttcttgccagtgagccaacctgttgttcactgtcccccataatttagtgagtgacggcaaccgtctgcacggtgacgaatcgctggcgatcaaaaaggggcgatattgaaccttcgattatgcttgatgggtgtattctcagtaatactgtaaagccggagcatgtctccggctttacagtatgggggaacagcgggcgatcgctcaaatggtatgctggtttatttcatgtaaaagaataaaatatctgtataaaatcatgccactggcaatctgcatcaactctccgggtaaacagggttaagatgagcatttccccggtttaatacaggtatacaaaagtggatagagatcaaacaaacagcagcctgttcaatgatgatcccgtacttcatgcaacatggctgtactatcaggaaggcaaaagccagactgaagttgcagctatcatgggggtgtcccgcgtcacggttgtcaaatacctgcaaacagcccgggaaaatggactggttcatatcaacctggatgtgaatgtctttggctctatcgacgctgctttgcaaattcgcgataaattcaatctccagagagtgatcatcgtgccggatggcgaacatgccggaaaacgtgatgatacaaagctgatgcggactcgcctttcacgtgccggtggcatgtatctgaatcaggtgattgagaatggtgatgtgctgggggttgcctggggaagaacaatccatcagatgagcaaaaccatgacgccgaagtcatgtaaaaatgtcaccgttatacagatgctcggttccatgccatctcagccagacctgacgatcattgaatcctcatcgcaaatcgcctacaagctttcaggccgtgtcgcctcgctgcacgtgcccgccgtggtatcaagcgccagactggccatggagttacaggcagagcctattattcgatcgaattttgacgttctgactcgctgtacgaaagccttttttgtcgtgggtaacgcgcttgatgaaaatcccctgattcgggtgggcgtgctgaataagaaggaaatgcagacgtatcgggatttaggcgcagtaggtgtcatttgtggtcgcttctatgacaaggaagggatgcccgtcgtggctgatgttgaccagcgtattctgggaatcagtctggctcagctaaggcagattgaacggaagatcttccttgctggtggggaaagaggctatgacgcaacgttgggtgccctgctgggaggatatgtcacggacctgattgttgatgaaggaacggcagagtttttgctggcgtgtgaattaccacactaaaagaatgaacaactgccccatgtagatatggggcaggattttattgattagcggcgataataagaacaatacccacaatgtatgaaataaacatggtcagcagcagtttattggttccggctggcgcactggcaaattctctccagatgaagactccccagatcacggcaatcattgtggccccctgtcccagaccgtaggaaatggcataccccgcctgaccagacgcaatcagactgaatgccagaccgacacaccaaatcataccgcccagccagccgcaaacatgatcccgtaaactcccggaaaaatacattttcccgttgaccggttctcctgaaataggttttttcatgaccagcctgttaaggacaaagttcgacaaaaacagccccacggcaaacagaacaagtgctgagtaaggcgtcatcagaccgctggcaggctggctgaaattgtcagacatggagtccgccaggaagcggaaaaaccatcccatgatgatacccgccagaatggcagtaatgagacctttattacggcgagatttatccgcctcctgcgtgacacgaccataggctatcgcggtaaaaataatggcgatcacaacgcagacgacaccgaggaacagaatgagcggatcgccctgcggattgccgatataggtggtgatcacacccagagccagtgccagccccacacccacaggaaaagctaccgccataccggcaagattaatagaagcgaccagaagaatattggaaatattgaagataatccctgccagtattgccgacatcagactactgctgctcgcctgctgaatatcaggtataaaactgcgaccggcttcgcccatagaacccagcgtgaaggcaaataacaaagaacacagcaataatccaattgaataatcccaatagaatagagggaactcccattttttattgctgacaagtttagttgtattcgcccatgaaccccagcaaatcatggtaataaaacacattattatggcgacagcatacgattccacgataaacataaataactccttgtggtagttataatcaatcgttgtggacagagggaatagcagccattctgcgaatggctgtcatatgttattaattaaaataaagctgtaattacgctttcaaaccatacgttttgaatttttcaaggacgatggtcatttcggcttcagacagcacgggaacatcgtgatgtaatccgccacatttgatgtataaatcagccagcgtctcggtttcacccgccagccacaacgtcttttccagcgtgacgtccatggccagcataccgtggtgctgcatcagcaaggacttactttctctgattcctttagatacaccgtcggccagttcaggactgccaaaggtataatagggaatacagggaatatgatccgtccccgataccgccaccatataatgaatggccggaattgaatgattatgtattgccaccgccgtggaattcaccgcatgcgtatgtatgacagcattcaattctggtctggctttataacacgccagatgaattaaccattcacttgatggtattttacccgcttcaggttttcccttatcgtctacaaagacaatcatgtccggcgtcatctttgaataagcgatcccactcggcgtaatcaacatgccaccggtatacctggcactcacattacctgatgttccttgattaagacggtaatgactccaacttactgatagtgttttatgttcagataatgcccgatgaccttgtcatgcaactccaccgattttgagaacgacagtaacttccgt

SEQ ID NO: 290 - DNA, 13029 bp, Escherichia coli
  source 1..13029: mol_type = genomic DNA
gtaattatctatgttttttgattgaattacagcttcatgatcaattccattgatataatagccattgcactcaataggggtaacaccatataaagccttaactctgtctgccgtagctttggtatcggaaacaccaactaaaatataaccattagattctctaccgatgttatttatggcgacagccgtttggactatattaatgaaacattcttcgtctattttattctcgcctgagagaataaataatccctgtttaaaatcataatttggttgttctgttcttgagttattaagtagagttcttatcagtgtttgccaagcatgattgataaatttattttctgattctttaaaatatcgtctgattaaagcacataaatcttcgacacttttctgacgagcgctagctgcccaacggcccccttcggtttgcaccattgaacgttgtacactgtctcctaactgagcgataaatttctgttcatcgtcaagttgcatgttttcatttatgattaattcatacaaagcaagaaaaacagcttgatagtaacgaggacattcttgagatgaagatgcattgcccagaatgtgtgatctaaagttcaaattatttgcatcaaataatttttgaatcatctcataaacgaagaggtaattattgacaattttatctgcaccatttgtctgaatgtaattctctaattgagttcgtgtatggattgcatgactcgtcgaaccttcaccgtaaaatgtatcgagcgatgttgatcctgatgttggcttatcatctaaaaatatatagcccaagatatttgcaactaactcttcatcgtcagagtctctaatgctaggcctactaatgatatgatttctaatatagaaatgattgtctatatttattccataatcgagtccatcattgcaaattgatatgttatgtattttattcagtcccattatatcgctatgtgtagtatctcctcttataattgtcgatattttccttactaactctgaaaaattactaacgcaccccgcacttcgtagttcttgttttgataaaattttaccattggaatttatgcgtcgaaacacttcgtcaatgtggtcctctgttgaagagtattcagatatagcaaatctatagcgagcaattaatgtagaactttcgcgggatagcactggctctttttgttgaagtttaccactgtcttttagttgttttgttaatgcaatggcatctaaattaaagtatttaccatttaatgaaaatcgctgctcaataaaactcattaaagcttctagtctttgcattccatcaaggatttctcttttgttgtcaatggaaacaaacaatagcaaagggatagggtattgctgagtcattgatgaaatcagtgctgttttctcttcgagggaccatactaattttctttggtatcttcgatttataattaatttatcatccagataccactcgtataattcttctgctgtcttggagtcaatatctaagttttcattagccattagatgtatctcgagtatttagttaagaaactgataggtcagtatttgcatcaatgttcattgaatttgtatccgaagtcaatctgatgtaggaacttcaaaactgcgcaaaacacgcaaatacgcacaagaaagtagggctgcgcttggaattcggaaaataaaccacatcaaaactactttttagccaaataacgtttgggaatcaccagaatggtgggacaacagcggttttagtgccctaaatcgtacgttttcatccggttgccctcaaaccccatgttcaagtcagaatagtggacaggcggccaagaacttcgttcatgatagtctccggaacccgttcgagtcgttttccgccccgtgctttcatatcaattgtccggggttgatcgcaacgcacaacacctgtggtacgtatgccaacaccatccaacgacaccgcaaagccggcagtgcgggcaaaattgcctccgctggttacgggcacaacaacaggcaggcgggtcacgcgattaaaggccgccggtgtgacaatcagcaccggccgcgttccctgctgctcatgacctgcggtaggatcaagcgagacaagccagatttcccctctttccatgtcagatttcctcctgaccagtcgccggtgcatccagccattctcgttcttcagctgatatttcagcatttggatcacactgtgccagtagctcagccagtgaatattgcgggcgtctgtacggctcaacaatcagccggccattatcaatgaccatgccaacttcattatctgtacccagagacagcgcattcagcagtgccggtgggacggtcagcataactgagccgccaaccctcttcagtcgggtggtatgcattcttcacctccataaaagttatatttaaatataacatccactaaaaaaacacaccaggctttaacgcacaatgtttaataaaaatataactttcaaccaaacagtaaacccagcgtggttgcttccatatgcagcaataccggcagcagcaggccaccacttctgatcctggccactgatgtaatcaaccccaccaggaacagttctgccagtgtcagcaggttctgatactggctgtgcgcggcgacgaacaacaacgacgttatcagcgcccccagccacatcgtccagcagtaccgtgaacggaagacgttcagcataatcccccggaacagcgtttcctcattcaacggggcaaggataaagatggtcagcaacgtcaggatcacgtcaggtatggacttatcggcaaaaagtttcgtcataaatggctcagcaggcagagtcagcgccttaccgagcagaaatacaccgacatacaccacggccatcgcaccggccagccacggtacgccaacgttgcgcagctgaccaacgaccggtagcggagctatccaacggcggtataccaggaaaacacacagcaggtacatcagaacagtaccatgactgaagaacaaatagttttttcctgatccataaagcagaacggcctgctccatgacaaatctggctccccaactaatgccccatgcagccagcataaccagcataaactgcagatattgattacgtgtttgaatcattgcatcgcctgtaaatttttaacttgtcctatttttgtcattaccacgtatatacagtaagcgttaacggagtgccgtattgatacttatttattggtgagtgctacgttccatggcaggagctcgtcaacacggttggaaggccattccggcagtacacccaggatatggcgcagatacgcttccggatctataccgttcagtcggcaggtgccgatcagcccgtacaacagtgctccacgctcgccaccgtgatcgctgtcgaagaacacataatttttcttcccgagacagactgcacgaagcgctctttctgcggcattattatctacctcagccaggccatcatcacagaagttgcacaacgcagcccagtgcttccggatataccggaacgcatctcccagacgacatttcttcgataacgtgtgttctttctcctgcatcagcttatacagggaagtcaggagcggtctactctgcatttgcctgaccgccaggtgttcagacaccggtaacccgcgtatatcgtgctcgatggcgtacagttcaccgattagtttcagggcttcttccgctgtcgcgcttttggtactgatatatacatcgtggattttgcgtcgcgcatgagcccagcatcctgcttccgtcaacgcgccgccttcacgtccggcactgaacagccgatcgtaaccattaaacgcatctgcctgcaggataccccggaagggacgaaagtgctgctccggatgtttcccctgatgatccggtgagtaggcgaaccagaccgccggaggctctggcgaaccggcattcctgtcatcccggacatacgtccagatatatcctgttttcgccttcttcctgcccggtgccagcacttttactggtgtgtcatcagtgtgaaccttgcgggtgttcatcacgtaacggtacagggcatcattcagcggcgtcattaactggcagcacgcgtcaacccagttggagagtaacgcacggctcagttcgacaccctgacgggcaaagatttcactctgacgatacagtggcaggtgttcgcagtattttcccgttaacacgcgggcaagtaaccccgggcccgcgacaccacgcgctatcggacgggacggtgccggtgcttcaacgatgcagtcacattttgtacaggctttttttacccgttctgtgcggatcactttcagggcgctgctcaccagttccagttgttctgcgctgacttcccccagataatccagctcaccaccacactccgggcaacagctttcctggctccaggcggtttatttcgcggggcagatgcgccggtaacgggcgacgatgacgcgactgtcgcaactggcggggaacctgcgggtcatcctcacgcccgctgtaacgatcgctgttctgttcgcgtcgtttcagcagggcttcagcctgttcaacttcacgacgcagtttttcagaacgggtaccgaacagcatccggcgcagtttttccacctgggcccgcagatgctctatttcccgctcatcttcttcgatcttttcttcggcacgtgccagcgcagaacgcaggaaggcctccgtctcttcaaccagactcagttgttggtctttctgacggagggcttcagcctgctcagagggcaacctttccagctcagtgatccgaatgaggtatttctgactcatgaccgtttttataatccggccatgacatttttacaacattgtcagtgcgttaagacgggatgttttgggctgacgccagtccagcttatcgaggagcattgccagttgcgagcgggtaatggatatcttgccgtcacgcaccgcaggccagataaactggccttcctccaggcgtttggtgaacaggcacagaccatcagcatcagcccacaggattttaatcgtgtcaccccgtcggccacagaagatgaacaggtgaccggagaagggattatcattcagcacatgctgtacctgttctcccagtccgttgaaggatttacgcatatcggtaacgccggcaacgagccagatgcgggtgcctgacgggagtgagatcatcgtcccctcccggtcagttcacggatcaacacagtgagcagctctggtgaaggattttccagcgtcatgttaccgtgacggaactccatcttgcaggagctggcactgacagtagtctgggtggataaagacggagtaagagcagccaccggttctttcggctcatccggcgttatctccacaggtaataattcaacgccagtgtcagaagaggttgttaccggaagacgccgcgatatacgcccttcgttttgccaaagtctgagccatttgaaaataacattatcattgacgccattttctcgagcaatctgggccacacaagcaccggattgtgatgccagttcaaccatacgaagtttgaattcattcgaatactttttacgaggttcttttcgccagtcctgtaattccatacttagatgtccgtctgtgtcagatgggcgtctaagttaccaattcttgtctaatggctacatacggcggtcggtttacgcttaccataatgcgggcagttgcccggcatccaacgccattcatggccatatcaatgattttctggtgcgtaccgggttgagaagcggtgtaagtgaactgcagttgccatgttttacggcagtgagagcagagatagcgctgatgtccggcggtgcttttgccgttacgcaccaccccgtcagtagctgaacaggagggacagctgatagaaacagaagccactggagcacctcaaaaacaccatcatacactaaatcagtaagttggcagcatcacccagaaagtcgataactattggcataacgtcattacgcaggagttccgctgttgctccagttatgacaaaatcgtctgcataccgaaccagatgtatcttagccttacggccctgtaccgttgtggatggaaatcgccgttccagcaaggattgtaaaccatccagcgccatgttcatcagcgtcggagagattattcctccctgaggcgttccgcctttcgtgggatagaaagacattccttcacaataaccagatttcagccagttccgcaggaccatccggtccatgggaatatgggatactaaccactcatggctgaggttatcaaaacatcccctgatatcgccctccagtatccactccgctgaggcttttttaccacaggcattgaaaacctgttcaatcgcgtctgcagtgcttctcattgggcgaaagccataactatggtgatcagccgtgatttcagacagtggctccagagccatcagatataatgcctgcattgccctgtccagcatcgtcggaattcccagtgcccggaatttcccgtttgccttgggaatataaattcgtcgcagcgggagtgggtggtatccactccgtttgagccgggtaatagcggaccacttggattcgggatgttgccatatttcgccatcaacccccggagttttacgtccggtgttttcagtaacacgtttaaccgccagggctttggcggaaaacgagcgggtcaacatgcgctgtaaagctttaactttacgccattgttgttcctgcgttgccttcgcaatacgtaactgcagcttcttcacgcgtcgatggcagtacctccagttaatgagatgccagtgcgacccatgggtagccgaagatacacgacaatgtgtactcatctttcagaactcccttgtaagacgctttgcagttcttcctgcgattaaagaccagacggaagtgggcgtgttttcacaccggggcaaagtctgaacccctatccgaactattacagttcggcattcgctttttccgtcctcctttacccgcatacttcacagcattccttacggtttgcctgcccggttgggcaaatatacgggcttaccaagttccgcttaatatacaaatgaacgagttaggttccgcctatccaccggtgaccttatgcccatgtatccccaaactggaaggagatagccagtcactcaccttttggttcaagcctgtcagcatctttggcttgtcaggaataacgatgtttatcagcagttcacatatgttaaccatatcgttcagcctggctctccatccgcatgatgcttgcagataatccttatcttcacagattccgatcggggtatcccggagctacgttgtcccgggggcttcagtccctactgttaccagtcaggcctgccccggtaggctactgctaatgggatagtaggttttatacaaaataatgttaaaacaatatattaagcgacttcttgtcacacccagttgataccttcaagaagcatggataactgagccggagtaaggtgcaccttgccgtcacgggtgaccggccagacgaagcggccccgctccaggcgtttggtgaagaggcacagtccgtcactgtcagcccacaacacttttatctggtcaccccggcgtccgcggaagatgaacaggtgtccggagaacgggtcatccttcaggacgttctgaacttttgatgccaggccgttaaaaccatttcgcatgtcggtgataccggcaaccagccagatacgcgaaccggcagggagagatatcatcagtggctgctccctttcatttcgcggataagtgactgtaataacgccggtgtcagttcacctttcagcctgagagttccggccggcagaaccagctcgcagcacagactgtcggtcggtgtatttatctgctcaacctgcacggggtccgggattttattatccggctccggcgttaacgtcacgggaagtagcgatgtttcatgttcgccgggcggctgcaggccgccgttacgccagagatgccgccagttaaagagcaggttatcgttgattccgttctcacgagctatttgtgcgacacaggcaccgggtaaaagagtttgctgaacaagtctccatttaaactccggtgaaaatcggttccgacggggtttctctgctttcacaggctgagtcacggtcggggctgaagggtatcgccccgggaaaagagcccgggccagttgcccgcaggaatattcaccggaaagaggccagtcagtgaatacctggtgaaatcgcctcaccagagaaaaaatggcggttttgctgataccggtctgcgcagaaatgcgcgggtacgacagtgactcgtcaaatctcagttgtagcacacgcaggatcaattccggattgtctgccagtaccgcctttcgtgcattcatcttaaatgtccctttactgcgaaaatggacattagtatcggaaacaggaaagggaggcgaaagacggtttaaatgagacggttacttatatcactggcgctgacacacaccatcagcggcagcggcggcaaccgcttccccaatccaggatttatggggaaacatcaggaagaaaggaaaacccccgtaattgtggtgaaaaaacgtcgaactttttcgccaccttccttataggtaagaacgcgatccttcccctgcacaaccgccggcgtgacttcgacttgaccacgaaagcttcgcagtgatgagcctgctcgccttgctccatcgcatctcatatccgattcttgctcatcggctcacggggtcattccgtgcatccttcccacgcccggtcgcccttacgcagttgcactttcttttgctcgctgtggccagctcgcgggaggcgcccatgctgggcgcacacatcctccacgccctgaagaacggggctttacggcacatcgggtaataaaccgccttcacgtcatgaggcagaagcgccagacacatcatagcccacatgcccatccaccccgaaaataatccggtcgcttagttaaataccataccgccatcaattatcagtgactggtctgtcatgtaatctgaatccgcactggccagataagacacacaggcagcaacatcatcaggttcagagatgcgaccaagagcaacgttttttgcccattgttgcaacccccattcaagatcctgaccattttcatcggccactttccgggcgatgccttccatcattggtgtccgcacaatacccgggcaataggcattaaccgttataccggatttcgccagatcccttgcggcagtctgagtgataccgcgaatagcgaacttggttgccccatagacagccaggtcagggttaccaacctgaccggcctgagatgaggcgttgattattttccccacaatctccccctctctttgtggcgttcttttccttatgtgcttcagaacagcctgaattccccagtaaacaccaccgacgttaacgtcaaaaactttacggtaaagttccggtgtgatgtcttccagtggcgtggtggggccaaggccggcattattgaccataatatcaacgcgcccgaatttcacggcaacctgatccactgcggaaaagacctgttcacggcaggacacatcaacctccacagccaaggcttctnnnnnnnnnncaataaggtttaccgtttcctgtgctgtatcttcgttaaagtccagacatccgattctgaatccatctttagccaggcgacgagcgatggcacgcccgatcccctgtccggcgccagtgataatggcgactttttttctgtaaccagaataattcctccattcagtaaaataattatatttaaccgcaataaagaccagtatgtccatgtttgtaataacttcgtaagttgcactcaactttgcacataaagcaaaaaaaaacattattttttgttataaatatcaccatttgcacatgatggtgaacatgagcgaactgaataatatgcgaacatctgatttttcattcctgactgagaacgaagctttcttttatgtggatcataataactgcctgtgttccactatatccggaaaagtgattgcagctaaccgtgaacagcttgacattcttattagatattttcagaaaataaggggaaaagttcagcctgcaccttactggttaagtgaacatcaacagtgacgggggttaccggcgtttgtttatcagggagtaacttcagatatgctaagaaagtctgtcgctgtttttttaacagcgatgattgtgttgccttctgtttccgtcggaaatgcctgtacaggcatttccctgacctcccgtgattcacattacatacaggccagaactatggaatggggaggcgaaaatcttcgcagcaaactgattgtttcgccacagggataccgatattcctctgttctgtctggcggggaaaaaggattatcctggcaggccagatacggctttgtggggatctccgtctttgatgaccggtatattgccgaaggtattaatcaggaaggtttatcagccgggttattttatttcaaaaactacggttcattgtcgaaatataatcctcagactcctgacaaaaatctggcagatatggatgtcgtccgctggatcctgactcattttaaaacagtcagggaagttcgtgagcatattcaacaactgaacattgttccaactgttattgacaggaatcaaaaaaataccgataccgttcactggcgcgtggctgacagactggggggaaacattattatagaaataaaaaatcaggggagtatttccattcatgagaatctggccggagtgatcacaaattctccggattatgagtggcatttaacgaatcttaataattacattaaccttgccgcaggaacggttgcttcgggacagatcaatggggtgaacacgttttcgttcggggcaggctcccgtgctctgggactgcctggcgatatcacgcccccttcccgctttatccgggcggcattttatgtcaataccacccccgaactgaaaaacggagatgaagctgtttctcaggcttttcatattctgaataattttgatatccctgttggcgttgaatatacatataagcatgaagtgcctgaactgccatccgcaacacaatggacaacagtgattgatcagaatcgtcgtcttcttttctataaaaccatgaacgacagtacggttaaattgattgatctgggcaacatccgttttacacaggaaaaagagaaccgttatccactggataacggggtgttttcatttcagcgaacagtgattgattaatgagaaacgaacggtgattaacaggcttttttattctgccttcgttatttatcggttcattattatgtttaggatgaaaaatatgagtaaatacacacacctgtcaggagtttcgttaattaataatgccccgttaaacaaaggtacagcattttcagcatctgagcggagagagttcaatctgaatgggttgattccggacaaaattgaaacactggaagaacaggttcaacgggtaaaaattcagcttgatcgctttgttactgatgaagcgcgacatgtgtttttacgtaatcttcaggacacaaacgaaacgctgttctacaagtttatcactacccatctggaagaaacgctgccgttaatctatacccccacagtcggttatgcctgtcagcattattctgaaatatggcgaaaaccccggggtatatgcattgcctgggaagacagagacaatattgatgctttgttgaggaacgttccgtcagataatatcagggtcatcgttgtgactgacggcgagcgtattctgggactgggggacctggggattggcggaatggggatcccggttggaaaactctccctgtattctgcctgcggggggattgatcctcagatgtgcctgccggtggttctggatgtgggaacaaacaatgaatcgttactggatagtcctgtatatatgggcgcccggcatccacgtattcctgacagtgactattacccgtttctggaacggtttattgttgctgtggaaaaacgctggcccggcgtgttgctgcagtttgaagattttgcactgaaacatgcgacgccgttactgaaaaaatatcaggatcgcctgtgtagttttaatgatgacattcagggaacggcagcagtgaccctgggaacgctgctgtctgcctgccgacataaaagacagacattatcttcgcagaccctgctttttgtcggggcggggtctgcaggatgcgggattgcggatttgattgtgtcagtaatgatagccgaggggctgaatgagcaggaagcgcgtcgccgtatttatatggtggataaagacggtctcctgctgaaagacaatccgtcattaacagactttcaatcaccctttgcctggcctgcagaacagcttggtttctctcctgaaaacaaaggtcttgatgcattaatcgcggaaatcaaaccttccgtgctgattggagtgtccggtgtggcagggctatttacagaacaggccatcagacagatgtatgcacattgtgaaaaaccgatcatttttccgctgtccaatcccacctcaagggcagaagcggtaccggcagatctgctgtcctggactgaaggcaatgcgattgtggccacaggcagcccgttctctcctgtggaatataacggggtgcagagggtgatttctcagtgcaacaatgcctatattttcccgggtataggacttggggtgctgatttccggtgccacacgagtcacccggaatatgtttctggcatctgcccgggcactggcatcatttgaatgtaaagacacaggactgttaccggatatccggcacatacatgacatatcccggatgatagcatttgcggttgcgcagtctgcgatagcagacaatgtggcccccccgcagacg

SEQ ID NO: 291 - DNA, 12881 bp, Escherichia coli
  source 1..12881: mol_type = genomic DNA
atggcgaaatggacgataccgggcttagctggcaacagcgtctgggtgactggtggcaggacgacaaaccgtggctgcgtgaagcgcctcgtctggaaagtgaaaaacagcgcgactggttcttctggcgacaaaagcgcggcgtggtggttgccgggcgcatgagtgcggaagagggcaaaaaagttgccctgtgggcgcaaactcttggctggccgctgattggcgatgtgctgtcacaaaccgggcagccgctgccgtgtgccgatctttggttaggcaatgccaaagcgaccagcgagctgcagcaggcgcaaattgtggtgcaactgggaagcagcctgacggggaaacggctcctgcaatggcaggcaagctgtgaaccagaagagtactggattgttgatgacattgaagggcgacttgatccggcacaccatcgcggacgtcgcttaattgccaatattgccgactggctggagctgcatccggcagaaaaacgccagccctggtgcgttgaaatcccgcgcctggcggaacaggcaatgcaggcggttattgcccgccgtgatgcgtttggcgaagcgcaactggcgcatcgcatctgcgactatctgcctgaacaggggcaattgtttgttggtaacagcctggtggtacgtctgattgatgcgctttcgcaacttccggcaggttacccggtgtacagcaaccgaggggccagcggtatcgacggactgctttcgaccgccgcaggcgttcagcgggcaagcggcaaaccgacgctggcgattgtgggcgatctctccgcactttacgatctcaacgcgctggcgttattgcgtcaggtttctgcgccgctggtattaattgtggtgaacaacaacggcgggcaaattttctcgctgttgccaacgccgcaaagcgagcgtgagcgtttctatctgatgccgcaaaacgtccattttgagcacgccgccgcgatgttcgagctgaaatatcatcgtccgcaaaactggcaggaacttgaaacggcatttgccgacgcctggcgcacgccaaccaccacggtgattgaaatggtggttaacgacaccgatggtgcgcaaacgctccagcaacttctggcgcaggtaagccatttatgatcctgcacgcgcaggcaaaacacggaaaaccaggtttaccctggctggtgtttttgcacggtttttccggcgattgccacgaatggcaagaagtgggcgaggcgtttgccgactactcacggttgtatgttgatctcccaggtcatggtggttcggcggcgattagcgtcgatggatttgatgatgtcaccgacttactgcgtaaaaccttggttagttacaacatccttgacttctggctggtggggtactcgcttggcggacgggtggcgatgatggcggcttgccaggggctgacggggctttgtggggttattgtcgaaggcgggcatccggggctgcaaaatgctgaacaacgtgcggaacgtcagcgttccgatcgccaatgggcgcagcgtttttgcacagaaccgttaacggcggtatttgccgactggtatcaacagcctgtttttgcctcgctcaatgacgatcaacgccgggagctggtggtgctgcgcagcaacaataatggcgcaacccttgccgccatgctggaggcgacttctctcgccgtccagcctgatttacgtgctaaccttagcgcccgcacatttgcgttttattatttatgtggtgaacgtgacagcaaattccgcgccctggcggcggaactggctgccgactgccatgtcattcctcgcgccggacataacgcgcatcgggaaaatcccgctggcgtaatcgcaagtctggcgcagatcttgcgtttctgactaaaggacacaatatgatttatcctgatgaagcaatgctttacgcaccggttgaatggcacgactgctccgaaggtttcgaggacattcgttatgaaaaatccaccgacggtatcgcaaaaatcaccattaatcgtccgcaggtgcgcaatgccttccgtcctctgacggtaaaagagatgatccaggcactggcagatgcgcgttatgacgacaatatcggcgtgatcattctgactggcgcaggcgataaagcgttctgctccggtggtgaccagaaagtgcgtggtgattacggcggctataaagatgattccggcgtacatcacttgaacgtgctggacttccagcgtcagatccgtacctgtccgaaaccggttgtcgcgatggtggctggctactccatcggcggtggtcacgttctgcacatgatgtgcgacctgactatcgcagcagataatgccatcttcggtcagactggcccgaaagtcggttccttcgacggcggctggggcgcttcctacatggctcgtatcgtcgggcagaaaaaagcgcgagaaatctggttcctgtgccgtcagtacgacgcaaaacaggcgctggatatgggccttgtcaacaccgtggtaccgctggcggatctggaaaaagaaaccgtccgttggtgccgcgaaatgctgcaaaacagcccgatggcgctgcgctgcctgaaagctgcgctgaacgccgactgtgacgggcaggcggggctgcaggagctggcgggcaacgccaccatgctgttctacatgacggaagaaggtcaggaaggtcgcaacgctttcaaccagaaacgtcagcctgatttcagcaaatttaaacggaatccgtaatgcgtagcgcgcaggtataccgctggcagatccccatggacgcgggggtggttctgcgcgacaggcggttaaaaacccgcgacgggctgtacgtttgcctgcgtgagggcgagcgcgaagggtggggggagatctccccactgccgggcttcagccaggaaacctgggaagaggcgcaaagcgtgctgcttgcctgggtaaataactggctggcaggcgattgcgagctaccgcagatgacttccgttgcctttggcgtaagctgtgcattggcggagctggcagatacgctcccgcaggcggccaattaccgtgcggcaccactgtgtaatggcgatcctgacgatctgatcctcaaacttgctgatatgccaggcgagaaagtggcgaaggtcaaagtgggattgtacgaagccgtgcgcgacggcatggtggttaatctgttgctggaggcaattccggatctgcatttgcgtcttgacgcaaatcgcgcctggacaccgctgaaaggccagcagtttgccaaatatgttaacccggattatcgccaccgcatcgcgtttctcgaagagccgtgcaaaacccgcgatgattcgcgagcgtttgcccgtgaaaccggcattgccattgcctgggatgaaagcttgcgcgagccggattttgcctttgtggctgaagagggcgtgcgcgcggtagttatcaaacccacgctcacgggcagtctggagaaagtacgcgagcaggtacaggcggcgcacgcgctggggctgacggcggtgatcagttcttccattgaatcgagcttaggcttaacgcaactggcgcggattgccgcctggttaacgccggacaccattccagggctggacacgctggatctgatgcaggcgcagcaggtacgtcgctggccgggtagcacgctgcctgtcgtggaagttgatgcactggagcggttgttatgatcttctctgactggccgtggcgtcactggcggcaagtgcggggagaagccatcgccttacgtcttaatgacgagcaacttaactggcgcgagctttgtgctcgcgtcgatgagttagctacgggctttgcggcgcagggcgttgttgagggcagcggcgtgatgttgcgggcgtggaatacgccgcaaacgctgctcgcctggctggcgttactgcaatgcggggcgcgggtgttgcccgtgaaccctcagctgccgcaaccgttgcttgaagaattgctgcccnnnnnnnnnnatttgcgctggtgccggatggggaaaacacgtttccggcgttaacgtcgctgcacattcagcgggttgaaggcgcacatgccgctacgtggcagccgacgcgtctgtgctcaatgacgttgacctcgggttctaccgggttgccgaaagccgctgtccatacttatcaggcccatcttgccagtgccgaaggggtgttatcgttgattccgtttggcgatcacgatgactggttgctctctttaccgctgtttcacgtctccggtcagggaattatgtggcgctggttatacgctggtgcgcggatgacggtgcgtgataaacagccattggagcaaatgctggcaggctgtactcatgcttcactggtgccaacacaactctggcgtttgctggttaaccgcagttccgtttccctgaaagcggtgttacttggcggcgcggctatcccggtcgagttgacggaacaggcgcgcgagcaggggattcgttgcttttgcggctatggtctgaccgagtttgcctccacggtgtgtgcgaaagaagccgacggcctggcagacgttggttcgccgctgccgggtcgggaagtgaaaatcgttaataatgaagtgtggctgcgggctgccagtatggcagaaggttactggcgtaacgggcaactggtttcactggttaatgacgaaggctggtacgctacgcgcgatcgcggtgagatgcataatggcaagctgaccattgtcggacgtttagacaatctattcttcagtggcggagagggtattcagccggaagaagtcgagcgtgttattgctgcacatcctgcggttttgcaggtgtttatcgtccccgttgccgacaaggagtttggtcatcgaccggtggcggtgatggagtatgaccacgagagcgttgatcttagtgaatgggtgaaagataagctggccagttttcagcaaccggtgcgttggttaacgttgccgcctgaactgaaaaacggcggtattaaaatttcacgtcaggcgctaaaagagtgggtgcaacgtcagcaataattaaccctccgtttcacttctcatttctgccattccattgccgttgataaagagtttatctgttaatctgtaaattgatgtgaaaactcttagcaaacaggataatgcaatggaatggctggtcaaaaaatcgtgctgcaataaacaagataacagacatgtacttatgctctgcgatgctggcggcgcgataaaaatgatcgccgaagtgaagagtgacttcgccgtgaaagtgggggatttactctcgcctttgcagaatgcgctttattgtattaatcgtgaaaagctgcatacggtgaaagtcctctcggcaagcagttatagccccgatgagtgggaacggcagtgtaaagtggcagggaaaactcagtaacgttgttttgtcatgggcaggaaaatcagcatcaacccgctcataatacaggctactcccagtagtgctttcagcgaaaaagtcccttcccagccgggaagtaccattgaagcaatccataccagcacataactcatactgagcaaggcataggctttgcttagcgcaagtttatgtagcgttttataccaacaaaaaacggaaagcagataacccagcagcccgagtaacagtatccgggcatccaggccaaaagctaacagagccgcgataaaatcccataagtgcgtcatcggcggcagatgactcgccgcaaaacccaggcttaattgcgcaactgaggcaataatgacgctgaataatccccacatcaggcccattacaccgtactcccgaggatcacaatgccaccaataatgaacgccaccccacaccagtgacgcggtgataccggttcgtgccacagttttactgcagccagcgtcacccagacaaaattcagacttaacatcgggtaggcaatgcctaccggtacgttctgcaagaccagcagccagagcaccatggcaagaccaagacaagccagcgccagtcccagccacagcacgatatgtttgcgccgtttgtttatcgccacaaagcaggttgcctgtttctgacacaactgcccggcaacgctaagcaagctggcaaagactaatgttagccagatcatttgggacgatactgaatcagcaccagacgctcctgacgatcgatggcatctgcgggcggaatggcgagactgttgatatcttcatcgcggtcaaccgaaagcacgagtgtaataatcccctcctgacgatgttgattaagccagtttgcgaactcatcaccgctgacaaatctccctttcgcatccggataattaaggccgtatttcaactcacctgtctggcgatacatgatgatgtcatcgcgttgcaggctccacgccagacctgcggcaacaccgacgctatcagtaagaatatagcggcttggctgaagtgattcttgtgtcatctcgacaaaaaattgcggatgttttccttccatgactctgtcaggaattgaaaatcctaccagcaacgccagccccagcgggcaaagcgcggcaaaagaccaggtcttttcgacgtttgttaaggtgtaccagccgaaaaatgcccatagcgaaaaaatcgaccaggcacaaaagactttatagatctcgaaggtttgccacaccggcgtgttcattggtccccagggggagaccacaaatgtggcaataatgccagtgacgccaaaagcgatgttaatccagccattaatccgcagcgccagaggattattttttgctgccagcaaagcgtaatgcgccatcagcattgccagagatgcaaagcaggaaagaatataggtgggcaatttacctttagcgacggagaaaaacagcagcggcattatcgtccagctcaacaaatagacggttgcggaatgcttgcggtttttccagcctgtgtacagtgcaccggggagtaatcccagccacggcaggctaccggcaatgatgaccggcacgtagtaccagaacggagctctatgttgggcatcatccagtgcaaagcgttgaatatgctcaacccagaaaaaatagtgccagaagttaggctctcgctgcgctatcgccagtccccaagggagaaccgtcagtacgcaactgataaccgccagccagccgtaaataaagagatctttccagcgtttttgcgtcgctacccatggcagcacgcttaataccggcacggcaagggcgagaaaacctttggtcatcacccccatgccgcaggtgattcccagcagtaaaaatcctgcgcttttgcctttccacgtctgtgcctgcattgccagccagaagctgcacattcccgccaccagccagaatgcaataaacggatcgagcacggcataagtgccgatggcatagacaataaacaatgagagataaattactgtggcgagtagagccagacgtttatcgcgccataagcgcagagtaaaccaggtcaccagcgcggcagttaacagggtcgcaaagataacgcctgcccgcacaccaaagttattcgcgccaaatagccattgcccaatgctgttaatccagtatccggcaatgggtttttcgaaataacgtagccctaacagatggggcacaatccagtcgccggatgccagcatttctcgactgatttccgcataacgcgtttcatcgggttgccagagcagacgcgtgctgatcggtaacaggtaatagcaggcaataaacgcgaagaggccgataaggtaacgtaccgatttcatcagcgactacccgcaatttgttggcaacccagccagccttcacgtccggcaatatttccgcgaacaacttgtccgagcggcaacgtctctgataacagttcgcttaaagggcaaaatgtcacgccttcctgagctgcgcgtttgaggagatccacaaaattatgctgataagcgcagccttcaacttctgcatgaatggtataaaccggcgtgcctttatctcgcaggatgcggttgagtaaccaaccgttaaaatcttctgctttcacatcccgaccaatcacttcatcccaggtgggtaaggtcaccggaatttgcgcagtgccagggtttcctgattcgagcaatggacggaacggcatggccccacgacaatcgctgttgtagcgcaaatggaacgcttcttttgcttcgatcaccttctggtcggcacgccagcccgcagcggcagaacaggttaccggttgaccgataatctcttccagagtgcgaagaccgcgtgcaatatcgtcgatcattgtttgccgatcccagttaccgctacgggcttgccaggcatggtgatcccaggcgtgcaggccgacttcgtgatgtttagccgcttcacgaatgatatcggcattggcatgaccaatctctttacctggccaggccgtacctgccagtaaaatatcccagccataaagcgatgccgcatttgagcgcagcatcttccacaaaaactgtggcttcaccagtcgccagagatggcggcccatattgtccgggccgacgctgaaaaaaatgctggcctgaatattatgcttactcaagatttccagcagacgcggcacgccttcacgggtgccacgaaaggtatcgacatcaatgcgtaagcctactttggtcatgatggtttatccgtaagatcaacggtgcgcaggaagaaatccagcgtttcgtcgatggtttcctgcatatcaattttcggctcccagtcaaggcagcggtgggcattgcggatgctcggtttacgatgctctacgtcctgatatcctttgccgtagtagctgctactttcgacaacgcgaaagcccgcaaacggtgggaaatgatggcgcagcggatgtttttcgaagctcgccagcagcatctcgcccagttcctcaatgctcgcttcgttctcaggattgccaatgttgataatttcaccgtcgcagcgatttcccgcattttcgataatgcggtataacgcctcgataccatcgcgaatatcagtaaagcagcgtttttgttttccgccatcaatcagcttaatcggtgaaccttctaccagattgagaatgagttgcgtaatagcgcgggagctgccaattcgcgctgcattaaggttatccagtcgtggtcccatccagttaaacgggcggaagagggtgaactgtaaaccctctttttcgccataggcccagataacccgatcaagtaattgttttgacaccgaataaatccagcgtggtttattcaccgggccgacgattaaattagaatggtcctcatcgaagtatttatcgctacacatcccataaacttctgaagttgacgggaagatgattcgcttacggtacttcacgcagtagcggataatgcgcagattctcttcaaaatcgagttcaaatacgcgcagcgggttgcgggtatattcaatcggcgtggctatcgccaccagcggcaagacgacatcacattttttgacatgatactcaatccattcggaatgaatactgatatcgccttcaacaaagtgaaaatgcggatgattcagaaaacggcttatcgcatcgctgccaatatccagaccgtaaacttcataatgatcttcgcgcagcaggcgttctgtcagatggttgccaataaagccattcaccccgaggatgagtacccgggtacggcgtcgggcggtgcaggcaggctggctattcaagcgtgaaccttgcaccaggcccagcgtctgcgctaattgcgagccctgcatagtaatgccgtcgcccgcctgtccggtgacgatttccagcgcgccatcgccacaggcaatcaacagcggtgcaatagaaatcacgctccccggctgtgctttgctggcatgaggatgaacacgcgacgaccagacggtaaatttctgattgccaacataggtgaaggcacccggccacggatcggcaacggcacgtaccatgttgtgcagtacggatgccggtttatgccattcaaggaaactgtcatccggcgttctgcgaccaaaacaggtggcttcgttttcgcgctgggcgatttccagaatattaccgtgtttaatggcgggtaatgtctgttccagtagctggcgcgcggcatggcacaatttatgatgcagcgtaatagcgatatcgtctggcgcaatggcaacgcgcagttgcgccacaatggccccagcatcggcacgttttaccattcggtgcaatgtaacgcccgtttccgtttcaccgttcaccagcacccagttcagcggcgcgcgaccacgatattttggtaacagcgaaccgtgcagattaaatgcacctgcgggagcgagctgcaaaatctcgtcgcaaataagatggcgataataaaaagagaaaatcacctctggtgacagttgggcaatgcgttccacccacagcggatgattaacgttatccggcgcataaaccggaatgcctctttccgccgccagatgagccaccgaaccataaaaggctttttcaccgggattatcggtatgggtaaaaatggcgctaatttcgtaaccggcagccagcagagcttcaataccgaggcatcccatatcgtggtaggcaaaaacgacggttttcattattcattttccttgctggatggacggataacttgctgaacaaaatagcgggggcgggcgcggacatcggtgtagatcctgccgatatattcaccgagtaatcccatgccgataaactgagcgccaataaaagtaaacagcacggcaaatagcataaagacgccttctgccgcccattgtggtccgaaggtcaggcgtaaaatcaccagcagcaccgcaatgctaaaacctccaatcgcaataatgctaccgagcagactcagcatacgtagcggcgttgtggtaaggcaggtcaccaggtcgtacatcaaattaatcaggcgcataaaactgtatttggattcaccaaactcacgctcggcatgatgtactggaatttcaattgcacggcgggcgaagatattcgccagaatcgggataaaggtgctgcgttcatggcagtgcaacatcgcatcgacaatatgacggcgataggcgcgcagcatacaaccgtagtcacccatcgctttgccagtggtgcgctgaataagccggttaatcatcttcgaagcggttttacgaaaccagctgtcctggcggttctggcgtacagtcccaaccacgtcgtaaccttcatcggcttttgccaccaggcgggggatttcttctggcggattctggagatcggcatcaagggtaataattaagtcgccagtaacgtgactgaatcccgccataatcgctgaatgttgcccgtaattgcggttaagcaaaatagacacaatatggctgttctccgcttgtgaggcttcgaccagcatatgcgcggaattatcgctactgccgtcatcaatcagcaggatctcatactctttccccaacgattcacaggctgtggtggtgcgcctgattaattccggtaagctttcctgctcgttataaacgggaataaccaccgagactttcttaacagggtggatttcaaacatggcttattgtcctgcgagttgctgaagggctgtgatgacgcggtcggcatcggcggtagtcatatccgggaacagcggcaacgaacagatgcgttcgctattccattcggtattcggtaacgacagcgtgggaaaacgctcgcgataatatttttgtgtgtgagcggcgcggaaatgtaacccggtaccaatgcctctttcttttaacgcttccatcaacgcatttcgactgataccacaacattgttcatcgacacgaataataaacagatgccaggcgtgaacgtgcggccagtcgggaaggcttaatggctgaaaggggagagctgccagtgcttgctgatattgctgggcaatttcgcgccgacgggtgttgaggtgctctaatttgactaactgtgtcagggcaatcgcggcgttaatatcggtcagattgtacttatagcccggtgttaagacttcagcctgcggtgcacggccccaggtttgtctgtcataggcatcgacacccagaccgtgaaatttcagcatccgtagctggcgggcaaggttttcattatcagttacaatcaggccaccttccgcacaggtaatatttttaatggcatgaaatgaaaaaatagcggtaccttttgcgccaatatgtcgccctttgtaatacgtaccgacggcatgggcagcatcttcgataactgcgatgccgtaacgttcgccaatggcgcgaatggcgtcaatatctgctggcgcaccggcataatgcaccggaatgatggctttagtgcgtggcgtaatggctgactcgatcgcttcaggcgtgaccatcagcgtatcgcggtcgacatccaccattaccggcgttgcacccaacaaggaaatcatattgagggttgaaacccaggtcagggaaggcgtaatcacttcatcgcccttgccaatttccaacgccattagcgtgatatgcattccggcggtggctgaactgaccgcgatggcatgctgatttcccgtcaactggcaaaaggcttgctcaagcgcctgattcttcggaccggttgtgatccaaccggattcgagaacctctttaactgcagcgagttcctccacgcccattgctggtcgcgaaaaaggcaaaaattctgacattgcttttccttccgccattgaatacctgtccacttatatttgctataaagagtgttgtgtatattttgccatttgg

SEQ ID NO: 292 - DNA, 12743 bp, Escherichia coli
  source 1..12743: mol_type = genomic DNA
ggttgctgcggtacagatggatgacacgggtactacccgtatcggtaaattcgtcttcaaccatccgttcttcatcccgggtactctgggtgttgccctggccgtttgcttcggcttcttgctgggtagcttcatgctgtaatgaccaatcgcggggcgttcacgccccgctttctttcccgccgactaacatccttcccccgtccgttgtatagtgacctctctcttgcggttccatctgttcttgcgaggtgtttatgcttgatgaaaaaagttcgaataccgcgtctgtcgtggtgctatgtaccgcaccggatgaagcgacagcccaggatttagccgccaaagtgctggcggaaaaactggcggcctgcgcgaccttgatccccggcgctacctctctctattactgggaaggtaagctggagcaagaatacgaagtgcagatgattttaaaaactaccgtatctcaccagcaggcactgctggaatgcctgaagtctcatcatccatatcaaaccccggaacttctggttttacctgttacacacggagacacagattacctctcatggctcaacgcatctttacgctgatcctgctactttgcagcacttccgtttttgccggattattcgacgcgccgggacgttcacaatttgtccccgcggatcaagcctttacttttgattttcagcaaaaccaacatgaccttaatctgacctggcagatcaaagacggttactacctctaccgtaaacagatccgcattacgccggaacacgcgaaaattgccgacgtgcagctgccgcaaggcgtctggcatgaagatgagttttacggcaaaagcgagatttaccgcgatcggctgacgcttcccgtaaccatcaaccaggcgagtgcgggagcgacgttaactgtcacctaccagggctgcgctgatgccggtttctgttatccgccagaaaccaaaaccgttccgttaagcgaagtggtcgccaacaacgcagcgtcacagcctgtgtctgtttcgcagcaagagcagcacaccgcgcaattgcccttttccgcgctctgggcgttgttgatcggtattggtatcgcctttacgccatgcgtgctgccaatgtacccactgatttctggcatcgtgctgggtggtaaacagcggctctccactgccagagcattgttgctgacctttatttatgtgcaggggatggcactgacttacacggcgctgggtctggtagttgccgccgcagggttacagttccaggcggcgctacagcacccatacgtgctcattggcctcgccatcgtctttaccttgctggcgatgtcaatgtttggcttgtttactctacaactcccctcttcgctgcaaacacgtctcacgttgatgagcaatcgccaacagggcggctcacctggcggtgtgtttgttatgggggcgattgccggactgatctgttcaccatgcaccaccgcaccgcttagcgcgattctgctgtatatcgcccaaagcgggaacatgtggctgggcggcggcacgctttatctctatgcgttgggcatgggcctgccgctgatgctaattaccgtctttggtaaccgcttgctgccgaaaagcggcccgtggatggaacaagtcaaaaccgcgtttggttttgtgatcctcgcactgccggtcttcctgctggagcgagtgattggtgatgtatggggattacgcttgtggtcggcgctgggtgtcgcattctttggctgggcctttatcaccagcctacaggctaaacgcggctggatgcgcgtggtgcaaataatcctgctggcagcggcattggttagcgtgcgcccacttcaggattgggcatttggtgcgacgcataccgcgcaaactcagacgcatctcaactttacacaaatcaaaacggtagatgagttaaatcaggcgctcgttgaagccaaaggcaaaccggtgatgttagatctttatgccgactggtgcgtcgcctgtaaagagtttgagaaatacaccttcagcgacccgcaggtgcaaaaagcgttagcagacacggtcttacttcaggccaacgtcacggccaacgacgcacaagatgtggcgctgttaaagcatcttaatgtccttggcctaccgacaattctcttttttgacggacaaggccaggagcatccacaagcacgcgtcacgggctttatggatgctgaaaccttcagcgcacatttgcgcgatcgccaaccgtgaacgacacttgcagtgggaaagacggaggaaaatagcgtgcaacgtgaagatgtactgggagaagccctgaaattattagaattacaagggattgccaacaccacgctggagatggttgctgaacgtgtggattatccactggacgagctacgccgcttctggccagacaaagaggcaatcctctacgatgcgctgcgttatcttagccaacagatagatgtctggcgtcgtcagctgatgctggacgaaacgcaaaccgccgaacaaaagttgctggcacgttatcaggcgttatcggagtgcgttaaaaacaaccgctatccgggctgtctatttatcgctgcctgtacgttttatcccgatcctggccaccctattcatcaactggccgatcagcaaaaaagcgcggcctacgatttcactcacgaactgttaaccacgctggaagttgacgatccggcgatggtagcaaagcagatggaactggtgctggaaggctgtttaagccgaatgctggtgaatcgtagccaggcggatgtcgacactgcacatcggctggcggaagatatcctgcgcttcgcccgctgccgccagggtggtgcattgacctgacagaaacacagaaaagaagcgatttgccgcaatcttaagcagttgaatcgcttttactgaaattaggttgacgagatgtgcagattacggtttaatgcgccccgttgcccggatagctcagtcggtagagcaggggattgaaaatccccgtgtccttggttcgattccgagtccgggcaccaaattcatatcaacggacctccacggaggtccgtttttcgtttctggacgccacaatttaagcgttctgcctccaaatcaattctcccgaactcaaccagattctccccacatcaccagcaatttgcgggcatatcccaattcgggaaaatttgttcctgagcgatagcactaactgacgtgaaatgtcgtgcggccccgtgatgttgttgaacgtcaaatgacgtcatcaggagcgtaacgcatccataaagcacaacaccggtctgaacgccgactgatgagattttctgaatgagaacaaagagaaatgtatcagtccgcttgctcatgcaaagactaacaatccattaaaatagtaagcgctccggacaattttccatggattattttctgaacatttttctttggcaaagatgatgaattttgatggtaaggaatattacttctggttctcagtaaaatcctttcgtaatactatgtaatcaagaagtttatggctggtaaaaataacgtcttacattcaccaataatatgtaaataaacccatctatagatggtaaaaataggttgtggcaattatcattgcatcattcccttttcgaatgagtttctattatgcaacaacctgtagttcgcgttggcgaatggcttgttactccgtccataaaccaaattagccgcaatgggcgtcaacttacccttgagccgagattaatcgatcttctggttttctttgctcaacacagtggcgaagtacttagcagggatgaacttatcgataatgtctggaagagaagtattgtcaccaatcatgttgtgacgcagagtatctcagaactacgtaagtcattaaaagataatgatgaagatagtcctgtctatatcgctactgtaccaaagcgcggctataaattaatggtgccggttatctggtacagcgaagaagagggagaggaaataatgctatcttcgcctccccctataccagaggcggttcctgccacagattctccctcccacagtcttaacattcaaaacaccgcaacgccacctgaacaatccccagttaaaagcaaacgattcactaccttttgggtatggttttttttcctgttgtcgttaggtatctgtgtagcactggtagcgttttcaactcttgatacacgtcttcctatgagcaaatcgcgtattttgctcaatccacgcgatattgacattaatatggtaaataaaagttgtaacagctggagttccccgtatcagctctcttacgcgataggcgtgggtgatttggtggcgacatcacttaacaccttctccacctttatggtgcatgacaaaatcaactacaacattgatgaaccgagcagttccggtaaaacattatctattgcctttgttaatcagcgccaataccgtgctcaacaatgctttatgtcgataaaattggtagacaatgcagatggttcaaccatgctggataaacgttatgtcatcactaacggtaatcagctggcgattcaaaatgatttactggagagtttatcaaaagcattaaaccaaccgtggccacaacgaatgcaggagacgctccagcaaattttgcctcatcgtggtgcgttattaactaatttttatcaggcacatgattatttactgcatggcgatgataaatcattgaaccgtgccagtgaattattaggtgagattgttcaatcatccccagaatttacctacgcgagagcagaaaaagcattagttgatatcgtgcgccattctcaacaccctttagatgaaaaacaattagcagcactgaacacagaaatagacaacattgttacactaccggaattgaataacctatccattatatatcaaataaaagcggtcagtgctctggtaaaaggtaaaacagatgagtcttaccaggcgataaatactggcattgatcttgaaatgtcctggctaaattatgtgttgcttggcaaggtttatgaaatgaaggggatgaaccgggaagcggctgatgcatatctcaccgcctttaatttacgcccaggggcaaacaccctttactggattgaaaatggtatattccagacttctgttccttatgttgtaccttatctcgacaaatttctcgcttcagaataagtaactcccgggttgatttatgctcgggaatatttgttgttgagtttttgtatgtttctgttggtataatatgttgcggcaatttatttgccgcataatttttattacataaatttaaccagagaatatcccgcaatccattgtaaacattgaatgtttatcttttcatgatatcaacttgcgatcctgatgtgttaataaaaaacctcaagttctcacttacagaaacttttgtgttatttcacctaatctttaggattaatccttttttcgtgagtattcttagcgccagtttggtctggtcaggaaatagttatacatcatgacccggactccaaattcaaaaatgaaattaggagaagagcatgagttctgccaagaagatcgggctatttgcctgtaccggtgttgttgccggtaatatgatggggagcggtattgcattattacctgcgaacctagcaagtatcggtggtattgctatctggggttggattatctctattattggtgcaatgtcgctggcgtatgtatatgcccgactggcaacaaaaaacccgcaacaaggtggcccaattgcttatgccggagaaatttcccctgcatttggttttcagacaggtgttctttattaccatgctaactggattggtaacctggcgattggtattaccgctgtatcttatctttccaccttcttcccagtattaaatgatcctgttccggcgggtatcgcctgtattgctatcgtctgggtatttacctttgtaaatatgctcggcggtacctgggtaagccgtttaaccactattggtctggtgctggttcttattcctgtggtgatgactgctattgttggctggcattggtttgatgcggcaacttatgcagctaactggaatactgcggataccactgatggtcatgcgatcattaaaagtattctgctctgcctgtgggccttcgtgggtgttgaatccgcagcagtaagtactggtatggttaaaaacccgaaacgtaccgttccgctggcaaccatgctgggtactggtttagcaggtattgtttatatcgctgcgactcaggtgctttccggtatgtatccgtcttctgtaatggcggcttccggtgctccgtttgcaatcagtgcttcaactatcctcggtaactgggctgcgccgctggtttctgcattcaccgcctttgcgtgcctgacttctctgggctcctggatgatgttggtaggccaggcaggtgtacgtgccgctaacgacggtaacttcccgaaagtttatggtgaagtcgacagcaacggtattccgaaaaaaggtctgctgctggctgcagtgaaaatgactgccctgatgatcctcatcactctgatgaactctgccggtggtaaagcatctgacctgttcggtgaactgaccggtatcgcagtactgctgactatgctgccgtacttctactcttgcgttgacctgattcgttttgaaggcgttaacatccgcaactttgtcagcctgatctgctctgtactgggttgcgtgttctgcttcatcgcgctgatgggcgcaagctccttcgagctggcaggtaccttcatcgtcagcctgattatcctgatgttctacgctcgcaaaatgcacgagcgccagagccactcaatggataaccacaccgcgtctaacgcacattaattaaaagtattttccgaggctcctcctttcattttgtcccatgtgttgggaggggccttttttacctggagatatgactatgaacgttattgcaatattgaatcacatgggggtttattttaaagaagaacccatccgtgaacttcatcgcgcgcttgaacgtctgaacnnnnnnnnnntctgaacttccagattgtttacccgaacgaccgtgacgacttattaaaactgatcgaaaacaatgcgcgtctgtgcggcgttatttttgactgggataaatataatctcgagctgtgcgaagaaattagcaaaatgaacgagaacctgccgttgtacgcgttcgctaatacgtattccactctcgatgtaagcctgaatgacctgcgtttacagattagcttctttgaatatgcgctgggtgctgctgaagatattgctaataagatcaagcagaccactgacgaatatatcaacactattctgcctccgctgactaaagcactgtttaaatatgttcgtgaaggtaaatatactttctgtactcctggtcacatgggcggtactgcattccagaaaagcccggtaggtagcctgttctatgatttctttggtccgaacaccatgaaatctgatatttccatttcagtatctgaactgggttctctgctggatcacagtggtccacacaaagaagcagaacagtatatcgctcgcgtctttaacgcagaccgcagctacatggtgaccaacggtacttccactgcgaacaaaattgttggtatgtactctgctccagcaggcagcaccattctgattgaccgtaactgccacaaatcgctgacccacctgatgatgatgagcgatgttacgccaatctatttccgcccgacccgtaacgcttacggtattcttggtggtatcccacagagtgaattccagcacgctaccattgctaagcgcgtgaaagaaacaccaaacgcaacctggccggtacatgctgtaattaccaactctacctatgatggtctgctgtacaacaccgactttatcaagaaaacactggatgtgaaatccatccactttgactccgcgtgggtgccttacaccaacttctcaccgatttacgaaggtaaatgcggtatgagcggtggccgtgtagaagggaaagtgatttacgaaacccagtccactcacaaactgctggcggcgttctctcaggcttccatgatccacgttaaaggtgacgtaaacgaagaaacctttaacgaagcctacatgatgcacaccaccacttctccgcactacggtatcgtggcgtccactgaaaccgcagcggcgatgatgaaaggcaatgctggtaagcgtctgatcaacggttccattgaacgtgcgatcaaattccgtaaagagatcaaacgtctgagaacggaatctgatggctggttctttgatgtatggcagccggatcatatcgataccactgaatgctggccgctgcgttctgacagcacctggcacggcttcaaaaacatcgataacgagcacatgtatcttgacccgatcaaagtcaccctgctgactccggggatggaaaaagacggcaccatgagcgactttggtattccggccagcatcgtggcgaaatacctcgacgaacatggcatcgttgttgagaaaaccggtccgtataacctgctgttcctgttcagcatcggtatcgataagaccaaagcactgagcctgctgcgtgctctgactgacttcaaacgtgcgttcgacctgaacctgcgtgtgaaaaacatgctgccgtctctgtatcgtgaagatcctgaattctatgaaaacatgcgtattcaggaactggctcagaatatccacaaactgattgttcaccacaatctgccggatctgatgtatcgcgcatttgaagtgctgccgacgatggtaatgactccgtatgctgcgttccagaaagagctgcacggtatgaccgaagaagtttacctcgacgaaatggtaggtcgtattaacgccaatatgatccttccatatccgccgggagttcctctggtaatgccgggtgaaatgatcaccgaagaaagccgtccggttctggagttcctgcagatgctgtgtgaaatcggcgctcactatccgggctttgaaaccgatattcacggtgcataccgtcaggctgatggccgctataccgttaaggtattgaaagaagaaagcaaaaaataattagctcgtacaagggaagtggcttgccacttcccttttttgctcataaggagaacacatgaaaacaccctcacagccgcgcgcgatatactatatcgtggcgatccaaatctgggagtacttcagtttttacggcatgcgtgccttactcattctctatctcacccatcagcttggttttgatgataaccatgccatcagcctgttcagcgcatatgcttctctggtttacgttacccctattctcggcggctggcttgccgaccgcctgctcggcaaccgcactgcagtgattgccggcgcgctgttaatgacccttggccatgtggtgctgggcattgatacaaattcaacctttagcctgtatctggcgctggcaatcattatttgtggctacggtttattcaaatcaaacatcagctgtttgcttggcgagctttacgacgagaacgatcatcgacgtgatggcggtttttcgctgctgtatgctgcgggcaatatcggttctatcgccgccccaatcgcctgcggcctggctgctcagtggtatggatggcatgttggctttgcccttgcgggtggcggcatgtttatcggtttgttgattttcttaagcgggcatcgtcatttccagtccacgcgtagtatggataaaaaagcgctcactagcgtcaaatttgccttaccggtatggagctggttagtggtgatgctctgtttagccccagtattttttaccctgctgctggagaacgactggtccggatatttgctggcgatcgtttgcctcattgccgcacaaatcattgcccgcatgatggtcaaattccccgaacaccgccgtgctctttggcaaattgtattgttgatgtttgtcgggacattgttctgggtactggcacaacagggcggcagtaccatcagcttgtttatcgatcgctttgtgaatcgtcaggcattcaatattgaagtacctacagcactattccagtcggtgaatgcaattgcggtgatgctcgctggggttgtactggcctggctggcgtcgccagaaagccgcggcaactcaacattgcgcgtctggctgaagtttgcctttggcttactgctgatggcttgtggctttatgttgttggcatttgatgcccgacatgcagcggctgacggtcaagcgtcaatgggcgtgatgatatccgggttggcgctaatgggctttgccgaactctttattgacccggtggcgattgcgcaaatcacgcgtctgaaaatgtctggcgtattaaccggtatttatatgctggcaacaggcgcggtcgccaactggctggcaggcgtcgtggcacagcagacgacagagtcgcaaattagcggtatggcaattgcagcttaccagcgattcttttctcagatgggagagtggacgttggcttgtgtcgcgatcatcgtcgtattggcctttgctacccgttttctgtttagcacgccgacgaatatgatacaggagagcaacgattaactgtcgtaaaaacaattggttatgaataaattaactttcagtttataacactagcaaatctagattaataagtcatttaaaccattttgatggttatttattagtgatatcaacttgaggtaagcgttagtttcgataagataaactgagttattaatagtcgaggcagataatacagtgtaccgatctgtctctttatctacgctaaattgaaagctggatttagaggaaccaaaatgtctgaacaagaaacacggggagccaatgaggctattgattttaacgatgaactgagaaatcgccgcgaaaaactggcggcactacgtcagcaaggtgtggcgtttcccaatgattttcgccgcgaccatacctctgaccagctgcacgaagagtttgatgcgaaggataaccaggaactggaatccttaaacattgaagtctcggttgctggccgaatgatgacccgtcgtatcatggggaaagcctcctttgtaacgttgcaggatgtcggtggccgtattcaactgtacgttgcaagagatagcctgccagaaggtgtttataacgatcagtttaaaaaatgggatctgggtgacattatcggtgcccgcggtacgctgtttaagacgcaaaccggtgagctttccattcactgtactgagttgcgcctgctgacaaaagcactacgtcctttaccagataaattccatggtctgcaggatcaggaagtccgttatcgtcaacgttatctggacctcatcgctaacgataaatcccgtcaaacgtttgttgtccgttcaaaaattctggccgctatccgccagttcatggtcgcgcgcggctttatggaagtagaaaccccgatgatgcaggtaattccaggtggggcatctgctcgcccgtttattacccatcataatgctctggatttagatatgtatctgcgtatcgcgccggagctgtatctgaaacgtctggttgtaggcggttttgaacgggtattcgaaatcaaccgtaacttccgtaatgaaggtatttctgttcgccataatcctgagttcacaatgatggaactctacatggcgtatgcggattaccacgatttgattgaactgacagagtcactgttccgcaccctggcacaagaggttctgggtaccactaaagtcacttatggcgagcatgtgtttgatttcggcaaaccgtttgaaaaactcaccatgcgcgaagcaatcaaaaaatatcgtccagaaaccgatatggccgacctggataattttgatgctgctaaagcattagctgaatctatcggaattacggtagagaaaagctgggggctgggacgtattgtcacggagatctttgatgaagtggcagaagcacatctgattcagccaacctttattacggaatatccggcagaagtgtccccgctggcgcgccgtaatgatgttaacccggaaatcaccgaccgttttgaattcttcatcggtggtcgtgaaatcggtaatggttttagcgaattaaacgacgcagaagatcaggctgaacgtttccaggaacaggttaacgctaaagctgcaggtgacgacgaagccatgttctatgacgaagattacgtgactgcgctggaatatggtctgccgccaaccgctggtctgggtattggcatcgaccgaatgattatgctgtttacaaacagtcatactattcgtgacgttattctcttcccggcgatgcgcccacagaaataaatttcactttaatgaacgaagcagtcaggcgactgcttcgttcatcgttccgcaaatccagttttgaggagagacgcttcgtttcacgataaccagcgggtccactcaactacagctcctaaaagagagaaaaaagtaatgccacaggcagactcattggccaggttattccgaccaggaatgcactaagtaaacgaatatgtgttttctcatgtgagataaaccagataatgacaaaggatatgttcacaccaatcacataaaaaattaatattttagagaatagtgccattttttatgttcttcttatc

SEQ ID NO: 293 - DNA, 12727 bp, Escherichia coli
  source 1..12727: mol_type = genomic DNA
cgcgttaaagtcgcgatttaaatccgcgtaaaattctgttttgttcattatataatcacttggttgtcttacctggaactgccagcctattaaaataagcattaaatgcgttaatgctcaagatcattccaatcatgggttaatattaatgttaattcttattacatttggcacgtcatggctcttaacacaccacaaattacgccgacaaaaaagataacagtgagggcaatcggcgaggaactgccgcgtggtgattaccaacgttgcccgcaatgtgacatgctgtttagcctgcccgagataaattctcatcagagtgcctattgtccgcgctgtcaggcaaaaattcgcgacgggcgcgactggtcgctaacgcgcctggcggcaatggctttcaccatgctgttgctgatgccgtttgcctggggcgaaccgctgttgcatatctggctgttaggcattcgtattgacgccaacgttatgcaaggcatctggcaaatgaccaaacagggcgatgcgataacggggtcgatggtctttttctgcgttatcggtgcccccctcattctggtgacctccatagcttatttatggtttggtaaccgactgggaatgaatctacgcccggtactgctgatgcttgagcgacttaaagagtgggtaatgctggatatctacctggtcggcattggcgttgcttctataaaggtacaggattatgcccatatccaggcgggtgtcggcttgttctcttttgtggcgttggtgattttaacgacggtgacgttgtcacatcttaatgtcgaggagctgtgggagcgattttatccgcagcgccccgctacgcgtagggacgagaaacttcgtgtctgtcttgggtgccattttaccggctatcctgatcagcgtggtcgctgcccgcgttgccatatcccgctacgcctgcgtcgccgtcatagtttgcaaaaatgctgggcggcgctgttagcgtcaatcgttttgttgttacctgccaacctgttgcctatttctatcatttatctgaacggaggacggcaggaagatacaattctttccggaattatgtcgctggcaagtagcaacattgcggttgcgggaatcgtgtttatcgccagtattctggtaccgtttactaaagtgatcgtcatgttcactttactgttgagcattcattttaaatgccagcaaggtttacgcacacgcattctgttactgcggatggtgacctggattggtcgctggtcgatgctcgacctgtttgtcatatctttaaccatgtcgctgattaatcgcgatcagatcctcgcttttactatgggaccggctgcgttttatttcggcgcagcggtaattttgactattcttgctgtggaatggctggacagccgcttactttgggatgcacatgagtcaggaaacgcccgcttcgacgactgaagcgcagattaaaaataaacgccgtatctcacctttctggctgctgcctttcatcgcgctaatgattgccggttggctgatttgggacagttatcaggaccggggtaataccgtcaccatcgactttatgtcggcggatggtattgttccgggccgtacgcctgttcgttatcagggcgttgaagtcggaacagtgcaggatatcagcctcagcgacgatcttcgtaagattgaagtcaaggtcagcatcaagtccgatatgaaagatgcgctgcgcgaagagactcagttctggctggtgacgccaaaagcatcgttggcaggtgtctccgggctggacgccctcgtcggtggtaactatatcggcatgatgccaggtaaaggtaaagagcaggatcactttgtcgcactcgatacccaaccgaaatatcgactggacaatggcgatctgatgatccacctgcaagcccccgatctcggttcgctnnnnnnnnnngttcattggtctatttccgcaagatccctgtgggaaaagtctacgactatgccatcaatcccaacaagcaaggcgtggtgattgatgtcctgatcgagcggcgttttaccgatctggtgaaaaaaggtagccgtttctggaacgtttccggcgttgatgccaatgtcagtatcagtggcgcgaaggtgaaactggaaagtctggcggcactggttaacggtgcgattgccttcgattcacctgaagagtcgaaacctgccgaggcggaagatacctttggtctgtatgaagatctggcccacagccagcgtggcgtaataataaaactggaactgccgagtggggcaggattaaccgccgactcgacgccattaatgtatcagggactggaagtcggacagctaactaaactggatttaaatcctggtggtaaagtcactggggaaatgacagttgatcccagcgtcgttaccctgcttcgtgaaaatacccgcatcgaattacgtaatccgaaattatcccttagcgatgccaatctcagcgccctgctgactggcaaaaccttcgagttggtacccggcgatggcgagccacgcaaagagttcgttgttgtgccaggcgaaaaagcactgctgcatgaacctgatgttctgacgctgaccctgaccgcgccggaaagttacggtattgatgcgggtcagccgctcattcttcacggcgtgcaggtaggcctggttatcgatcgtaaactcaccagcaaaggcgtcacctttaccgtcgccatcgagcctcagcatcgagaactggtaaaaggcgatagcaaatttgtcgtcaacagccgtgtcgacgtgaaggtggggctggatggcgttgagtttctcggtgccagcgcctcagaatggattaacggcgggatacgtattctgccgggcgataaaggcgagatgaaagccagctatccactgtatgccaatctggaaaaagcgctggagaacagccttagcgatttacccaccacaaccgtgagtttgagtgcagagacgctgccggatgtgcaggcaggatcggtagtgctctaccgtaaatttgaagttggtgaagttattaccgtccgtccgcgagctaacgcgtttgatatcgatctgcatattaagccggagtatcgcaaccttctgaccagcaatagcgtgttctgggcagaaggcggggcgaaagttcagctgaatggtagtggcctgaccgtacaggcatccccgctctccagagcattaaagggagccatgcgcctcacgcaacattttctgctctggctgacgaatcgtcgtagaaagcgccaatgacagaatcagcagggcgaaaatcacgtagaaggtcacatagaaaccgccaaacagtgaggcgataatcgaaccaaaaatgctaccgataccgaagccgaggtaaatcacaccgtagtttttcgccaggttattgaggccgaagaactcactgaccagtgacggaaagacggtaatagtgccgccaaagttaaatgccacgcaggcaatcgctgcaaagaacgtcactgcattcagtggtgcaaacagcagggccgccatacccactagcgaaatcacctgaccaatggtgataacacggatacgggcgattttgtcagacagtatccccagaaccagacgacctgaaaggttggcgatggaaataacagtgactgcattagctgcggaaaccacatcaaggtgtgccagactttgggcgatatctttcgctaccccaatcacgtacaggccgctcatgcaggcagtcaggaacattaccgctaacatccagtactgcggtttacgcatcgactctgccagcgtgtaatctttctccaccacaccattgctggttttcacttcctgttttggtgcgtctttcattaacgttgcgccgaaaacaatcatcaccagcgcaatcgctccccaaatcacaaatgttttttccaaacccaccgtttcgagcagctgcgtgtcgataaatttgaaacccaggctacccagaccataagaaccgatagcgaacgcggagatcagacctttacgctccgggaaccacttcacgcagttagagagcgtcagcaggtaacccgcgccatccgccagaccgaccagcacaccggcgcttaaccacagcatcatcaggttgttggaatgcgcggtcaggaagaagcctaatcccagcaaaatgccggaagccatggtgacgcgtttaacgccaaaacgttcctgcaatttgcccgcaacagaagacgaaattgccagccccagacttaacaagccgaaagagaaagcgacctggcttaccggcgcatccagcttggcagaaagcgcgccattaaacaggctccaggtataaaccgaccccagtgcaaactgggtaatgatagtaccgatgagtgtcagccagcgggtacgctgataatttgaaggtgtcatggcagtattcctgcagtaataaaaaggaaaaatctctgccgacaaccataacgaagtgcattttatgcctggggaaaaacggcatgaaatgccatcagaacggaatgaaatgccttagttcaggaatgaatgacgcgacaattattcaccaaatttattatttggtaagttagcacccactatcgccacaactgttgttattcaatggtttcaattgtgactgttacgttaaaatctggcgctaacccccatcgtatacagatagtcgctattattagtggtattttctgcctgagttagcgcggcataggcggcaatattttgattgagcaacatatcagcgcctacggtgacatccagccagttgccgttctggtttgtcgccgtcatccggctcaggcctgattgcgccttccagatattctcgccaaattgctggttatagctgatttgcgcccagggtcggagatcgccaagccgggagtcaacacgccagcctaagctactcacgctggcatgccataacggatcggtcagcgtggtagtactgtcgccaaactcgttatacatcgaggtggttgtgccatcgtaatgtaatgccgcgaccgggccggttgtaacctgttcatataaaggaaaattccagcccatactcatactgctggtcacatccacaggagtttcttccgccagattgacttccagtcccagcgccctttggctactttgaatacgttgcgacaaaatatcgttgtaatcaggttgatgatcactatcccaggtgtaacgctctgtggaatgtccgggttgcgtatcaacgatatattcttgttgccaggcgtaagctgtgttgagaaaaaaggcactgattaccacgctcgccagcaggcttagctgccagcgaccaccgcnnnnnnnnnncattaacacgactccagggaagagccgaattcggcaatattattgtcattgcatgaaggatatcgggcatagtagccctgtattaaatattgactttttcaccgatgcgtcaagaaaagcggctgaaatttttacgatcgggtacatagcgagggaaagtatggaacgttgcggctgggtgagtcaggacccgctttatattgcctaccatgataatgaatggggcgtgcctgaaactgacagtaaaaaactgttcgaaatgatctgccttgaagggcagcaggctgggttatcgtggatcaccgtcctcaaaaaacgcgaaaactatcgcgcctgctttcatcagttcgatccggtgaaggtcgcagcaatgcaggaagaggatgtcgaaagactggtacaggacgccgggattatccgccatcgagggaaaattcaggcaattattggtaatgcgcgggcgtacctgcaaatggaacagaacggcgaaccgtttgccgactttgtctggtcgtttgtaaatcatcagccacaggtgacacaagccacaacgttgagcgaaattcccacatctacgtccgcctccgacgccctatctaaggcactgaaaaaacgtggttttaagtttgtcggcaccacaatctgttactcctttatgcaggcatgtgggctggtgaatgatcatgtggttggctgctgttgctatccgggaaataaaccatgattcgggaagcgcaacgttcagaactccccgcgatcctcgaactgtggctggaaagtacaacctgggggcatccctttataaaagcgaattactggcgtgactgcattccgctggtgcgggatgcctatcttgccaacgcgcaaaactgggtctgggaagaggacggtaagcttctcggttttgtcagcattatggaaggccgatttctggcagcaatgtttgtcgcaccgaaggccgtcagacgcggtattggtaaggcgctgatgcagtatgtgcagcagcgctatccccatctgatgctggaggtttatcaaaaaaatcaaccggcgatagatttttaccgtgcgcagggttttcacattgtcgattgcgcatggcaggatgaaacccaactacccacctggattatgagctggccggtggttcaaacgctgtaagtgtcagttccggaccgttgtatttttccagccatgccagcgccgtattacccgcacagccattccccagccgcgagctggggagatctttggtcagcacgttgactgcgccgtttttacaaataccgtcagcggttaaatccagatccggccatgccccttcgtgaatacaaatcacgccaggtttaattccctcgctaatgaccgctccggcaagaatttgcccgcgtgcgttccacagccgaacagtatcgccatcttgaatgccgcgcgcctgagcatcgtcaggatgaatggtgacaggctcacggtttgctaccgcgtacaattcgcgcagagaactgtaattcagctggctgtgcaggcggtgcgccggatgggcagaaagtacctgcaactgttctggttcggcattgccctgccattcgtccggctccagccacattggatgcccagggcaatccgggtaaccgtaatcggcaatacgctgtgagaagatttcaatcttgccgctggcggtttttaacggatgcgccagcggatcgcggcaaaaatcagcgaagcgaataaaccgctcgctgtccgggttttccggcatctcaattaactggttggcttgccagaactcagcaaatggcggcaattcaacctgctggcttgccccgcgctgccgggcaacgttataaaacgtttccagccattgcagctcactttttccttccgtaaaacgtgcataaccgcccttctcccagcgttcacttaactcggcaaaaacatcaaaatcattacgcgcttcatagcgtggcggcaccacttgcttcatcggcaccagatgctgattactgtaatcaccggtcatggtgagatcattacgctcaaaagaggtagtcgcaggcagaacgatatccgcgtgtttcgccgccgccgtccagaagcattcagagatcaccaccagctccggtttttgccaggcacggatcagacgattggtatcctgatgatgagtaaagttggcaccgcccgcccaccagataaaacgaatatccgggaaatgtcggttcataccgttgtgttgatatgcgccaccagggttttccagtgcttcaacaatgcgggcaacagggattttatccaccgcatcgcagccacccggcaagctgccctgcatggaagagagcaccgcagaacgccgcgtggggttaccaccattggcaaaatggtaagaaagaccaaaaccgccgccgggtgtgccgatttgccccaacattgctgccagcgtgacgatcatccagtgtttttgctcaccaaactgttggcgctgcattccccagcctgccatcagcatggtggtattttggtggaaaatagccgccagctcgcggattttcgctgcgccaacaccacaaatctctgctgcccattcggcggtttttgctattccgtcactctcgcccagcaaataagaggcggagacggcataacctgtggtgcaacgcgccagaaacgcttcgtcgtgccaaccattttccaccagcgtatgggcgatccccagcatcagcgcaacatcggtgcccatgtgcggtgccacccactccattttatcgccaaagaaatcgacggtttccgatcgcattggatcaatgcagatcagctttttcccactgtcacgcagtgcagaaaagtaagaaagcccctgctcatcagatgcattccacgcaattttcagcgtattgagtgggttagcactccacaacaccacgacatcgctatgttccagcaccagcggccaactggtttgctgttgataaacttcgctgccacccacgacatacggcatgatcgcctgtgccgcaccggtcgaataatcccccagatgcccgatataaccgcctgccagcgccatatagcgttgtaataatgtcgaggccttatgcagcacgccgtttgaacgccagccgtaggaaccagcaaaaatcgatgccggaccataagcctcacgaatgcgtttatgttgttggtgaataagatccagcgcctcatcccaactcacgcgaacaaattcatcctgcccacgaatgccttgcgggttttccggtgacgcgagaaagcctttgcgcaccattggaaatcgtacccgcgtattgctgtgaacctggtcgcgaaccgcgctctgcaaggagttttccattcctgtggctaacgcgccacgcgagctaaacacggttttgccgtcggtttcaaccagcatgggcccccagtgggcggcagtcagaacggaatatcgtgaggatgagttggccaaaccgaagactcctgaaaggttagatgtattgagcagttaaatattacttacaaatttccgagtattcccaggaataatcttcatgttcacgcggcataatctcccgccacggaacccgtggcaaagaataaaaaggttattaaggattaacaatgaagaaacgtgtttatcttattgccgccgtagtgagtggcgctctggcggtatctggctgcacaactaacccttacaccggcgaacgcgaagcaggcaaatctgctatcggcgcaggtctgggctctctnnnnnnnnnngtattggtgcgctctcttcttcgaagaaagatcgcggtaaaggcgcgctgattggcgcagcagcaggcgcagctctgggcggcggcgtgggttattacatggatgtgcaggaagcgaagctgcgtgacaaaatgcgcggcactggtgttagcgtaacccgcagcggggataacattatcctcaatatgccgaacaatgtgaccttcgacagcagcagcgcgaccctgaagccggcaggcgctaacaccctgaccggcgtggcaatggtgctgaaagagtatccgaaaacggcggttaacgtgattggttataccgacagcacgggtggtcacgacctgaacatgcgtctctcccagcaacgtgcggattccgttgccagcgcgttgatcacccagggcgtggacgccagccgcatccgtactcagggccttggcccggctaacccaatcgccagcaacagcaccgcagaaggtaaggcgcaaaaccgccgtgtagaaattaccttaagcccgctgtaatccctttcatgccaggtgatgcagaaatcacctggcattcttcagttttccttcatcatatttcaggctaaggtgatcgccttatcagtgaatggagagaagcatgaagccgtccgttatcctctacaaagccttacctgatgatttactgcaacgcctgcaagagcatttcaccgttcaccaggtggcaaacctcagcccacaaaccgtcgaacaaaatgcagcaatttttgccgaagctgaaggtttactgggttcaaacgagaatgtagatgccgcattgctggaaaaaatgccgaaactgcgtgccacatcaacgatctccgtcggctatgacaattttgatgtcgatgcgcttaccgcccgaaaaattctgctgatgcacacgccaaccgtattaacagaaaccgtcgccgatacgctgatggcgctggtgttgtctaccgctcgtcgggttgtggaggtagcagaacgggtaaaagcaggcgaatggaccgcgagcataggcccggactggtacggcactgacgttcaccataaaacactgggcattgtcgggatgggacggatcggcatggcgctggcacaacgtgcgcactttggcttcaacatgcccatcctctataacgcgcgccgccaccataaagaagcagaagaacgcttcaacgcccgctactgcgatttggatactctgttacaagagtcagatttcgtttgcctgatcctgccgttaactgatgagacgcatcatctgtttggcgcagaacaattcgccaaaatgaaatcctccgccattttcattaatgccggacgtggcccggtggttgatgaaaatgcactgattgctgcattgcagaaaggcgaaattcacgccgccgggctggatgtcttcgaacaagagccactgtccgtagattcgccgttgctctcaatggccaacgtcgtcgcagtaccgcatattggatctgccacccatgagacgcgttatggcatggccgcctgtgccgtggataatttgattgatgcgttacaaggaaaggttgagaagaactgtgtgaatccgcacgtcgcggactaagccgcgactgcgtgaagtaaagcccgataatcgctcgggcttttactctttattgggttgcagtaactgctgtagtccaggcctgattaaacgcctgatgttgtgccggtaacggcgcaatcagtttgttatattcacttgcctgctgcgaagtcgggaactggataccatttgctacaaagctcacctgagtaccttgttgagcaatgtagtctccaaccatcaccagttgttgcgtgaaagtttgtgcagccggaatcaacggttgcaatgcatcagctggcgttgttaccactttggtgaatgcctgatcaaagaccggtttcaaatcatcggtctgttttagcgcagagtgcgcagcatcggcctgcaacttcgcattttgcagttgttgcgccagcacacccagcgaaccgttcatttcacgcagcggaccgctttgcgtaacgtaatcctgcggtacgcgaattgcgttaacgctgtctacgaccgggcgcagaccggaatccatcgcctgattcacctgctgagaataaccatacagaatcgcgtaatcagagacaaaaggaccaaactgttttttctgatcggcagtcagggttggtagacgttcaccgctacgcatcactgtattctgcaggaagtcgataaacgctttacgctgatcgccttctttatcaaaacacccactcaggctaactaccattaataacgccgcaagaggcgcaaaccagcgagagcaggactttcctgtcgccattttcttactcctttcacccaaaaaaagcgcacaacgacacacgcgtgtctgacgtgacaaggatagtccaggacaggcttgcaggataccctttctacgtaatcttcctggtaaaatcatggagaaaatgaaacaaggttaatttgttgtttcattgttaaaaaatgatagtgccgttgctttttttgtagccagagatttacgccttcgcagaaggttagattttcgaaatctttacaaaccaggagtggtaagagatatatcggcatttatcagatcgttaggtggctataagtcacgctaaatgactggctgaatcgaatcatagccagagcatgccctgacttcaccccgctgtgtctgcttttcccgactattcttaatgagcttcgatgcaattcacgatcccgcagtgtgatttgaggagttttcaatggaatataaagatccaatgcatgagctgttgagcagcctggaacagattgtttttaaagatgaaacgcagaaaattaccctgacgcacagaacaacgtcctgtaccgaaattgagcagttacgaaaagggacagggttaaaaatcgatgatttcgcccgggttttgggcgtatcagtcgccatggtaaaggaatgggaatccagacgcgtgaagccttcaagtgccgaactaaaattgatgcgtttgattcaagccaacccggcattaagtaagcagttgatggaatagacttttatccactttattgctgtttacggtcctgatgacaggaccgttttccaaccgattaatcataaatatgaaaaataattgttgcatcacccgccaatgcgtggcttaatgcacatcaacggtttgacgtacagaccattaaagcagtgtagtaaggcaagtcccttcaagagttatcgttgatacccctcgtagtgcacattcctttaacgcttcaaaatctgtaaagcacgccatatcgccgaaaggcacacttaattattaaaggtaatacactatgtccggtaaaatgactggtatcgtaaaatggttcaacgctgacaaaggcttcggcttcatcactcctgacgatggctctaaagacgtgttcgtacacttctctgctatccagaacgatggttacaaatctctggacgaaggtcagaaagtgtccttcaccatcgaaagcggcgctaaaggcccggcagctggtaacgtaaccagcctgtaatctctgcttaaaagcacagaatctaagatccctgccatttggc

SEQ ID NO: 294 - DNA, 12692 bp, Escherichia coli
  source 1..12692: mol_type = genomic DNA
cgggcagctatccagacacaccaggcaacccgttttcttctcttctgctgccgttaaattaccgccaaagcgcatgtccagtttcttgccattactgtcaacaatcacttcatcgaaggaatacgcttttgccgccccttgccagttgaccgaaatatccagtttgctgcctgtgacatgagtcgtttctttattatccatcgtcatgttttcgcccggcgtaccacctgcctctttcagggcttcataaaatgctttcggggtcgcataagccataaacagcgatttatgtccgttggagccatctttaaacacaataccgtgacgagtgtcgtcggtgaggaaacgaccattaatttgcaccagcatggttaccgtatggttattggcatcgacgcgcagcggttggctgttcgaaagtccgtcgtattccacttttgccgccgcattctctttttgatcgcagccgctaagcccggcaacagccagtaagcagagtgcagccagtccttttttccatgacactgaataatgttgcgacatcgttctatccttcattttttgggtgagtaagtgggctgcggcgcgaagcagacagatccacatgtttgtgtcgggcgtagagttttgcgagctggacgagaataaacagcgccaggcccgccagacagagttgtaaaataaagcgcagcgtaatgccttcattggcgagaacgcttgccatcacggtataaataacaataccgggcagggtcgtgagtgccgaaataagggtataaggccagaaggcgattgtggttaatccgtaagcgtaattttgaatattgtaaggaaacaacgggattaagcgggtcagaataagaaaatcaataccgttacgcgcaatgcctttttcaatggcctgaaaggtatggctatgaccaacgtatttcagcagtaaatcacgtcccagccagcgcgccagcaggaatgagcacgaggaggcgagcgtggcggcaattaatgagagtagtgtccctaagagcgggccaaaaactattcctccagcgatcaccagtatgcttcctggtaacagaaagagagtggcaataatgaataacagaatatagaggctataaccgaacaatccgctctggcggatgagtgtctgtaagtggggtaaatcggtgagcagatcgaataaaccgaaagtgtggatagcgtaaatgaccagcgcaaaaataagacaggccaaaagaaatttacgctcagcgttcatcgtggagtttcctatatcaaacttgataatagagaagtggtcagacaactaaaaacgcagtgacggtataacaaaggacggcaggcaacaaatcattactgacagtttgttgatttttctcaaggttaattctcctgacccagtttgagccaggagagctgataaattagcggcggaaggtcgcccagacgggggcgtgatcggacggtttttccatgctgcgaatttcatagtcgatgccggtttctacacaacattctgccagcggttggctggcgagcagcaggtcgatgcgcagaccacggttatcgtcaaaaccttttgagcggtaatcaaaccatgagaaacgatctgctgtttgcggattagcatggcggaaagtatcgaccaacccccagctcatcagcctgtccatccattcgcgctcttccggcaggaaagagcatttaccggtacgcagccagcgcttacggttttcttcgccaatgccgatatccagatctgtagggctgatattcatatcgcccataatcagtaccggattatcacgtttgagttcggtttccaggtagttttgcagattctgataaaactgcgcttttgccgggaattttatcggatggtcgcggctttcaccctgcgggaagtaaccgttgatcacggtgacattacccagcagtgaggggatttccgccataataatccgccgctgcgcctcttcgtcgtcaccgggaaagccgcgacgcacggcaatcggcgtctctttggtcagcagcgccacgccataatggcctttctgcccgtgataaaacacgttgtagccgagcttcgccacctcttcgagcggaaacatatcatcatgaacttttgtctcctgcaggccaatcacatccggttggtgcttttcgacgatggcttcaagctggtgaggtctggcgcgcaggccgttgatattaaaagagacaaatttcatagtcgctgccatttattcagataaagagtgcgtggatggtagcagaatttcgcgttgcttaccgcctgttgttaagtgatttgatcgatggttgttaatgatgtcaacgatggcgcaaaaaatgcccgcttttggtgcgcgctgcgtcagaatggcgcagtaatttccagtaaatttcgtcaatgatcacaattccagaattatattttacttctgcataacattgcgttttttattctttttattcacccacatcgcaaacgtattcactttatatgcactttaaatgcatatggtttggttataactccttgatttccagttagcctccgccgtttatgcacttttatcactggctggcacgaaccctgcaatctacatttacagcgcaaacattacttattgttaacatataaataacgaattatttactgtagaggtcgctatgtctcagccaattacgcgtgaaaactttgatgaatggatgatacctgtttacgctccggcaccctttataccggtacgtggcgaaggttcgcgcttgtgggatcagcagnnnnnnnnnntcgacttcgcgggtggcattgcggtgaacgcgctgggccatgcgcatccggaactgcgtgaagcgctgaacgaacaggcgagtaagttctggcataccggcaacggttacaccaacgagccggtactgcgactggcgaaaaaattgatcgacgccacgtttgccgatcgcgtcttcttttgtaactccggtgcggaagccaacgaagcggcgctaaaactggcgcgtaaattcgctcacgaccgctacggcagccataagagcggcatcgtggcgttcaaaaatgcgtttcatggtcgcacgctgtttactgtcagtgcgggtgggcagccagcctattcacaggattttgcgccactgccggcggatattcgtcatgctgcatataacgatattaactctgccagcgcgctgattgacgactctacctgtgcggtgattgtcgaacccatccagggggaaggcggtgtggtgccagccagcaacgcgtttttacaaggtctgcgtgaattgtgtaaccgccacaatgcgctgttgatttttgatgaagtacaaaccggcgtcgggcgcaccggggaactgtatgcctatatgcactacggcgtgacgcctgatctgttaactaccgccaaagcgctgggcggcggtttcccggtcggtgcgttgttggcaaccgaagagtgcgcccgcgtgatgaccgttggcactcatggcaccacctatggcggtaatccgctggcctcggcggtggcaggcaaagtgctggagctcatcaacacaccagagatgcttaatggcgttaaacagcgtcacgactggtttgttgagcgtcttaatactattaatcaccgctatggtttgttcagtgaagttcgcggcttaggtttgctgattggctgtgtactgaatgccgattacgccgggcaagcgaaacagatctctcaggaagcggcgaaagcaggcgtgatggtactgattgcgggtggcaacgtggtgcgttttgcgcctgcgctcaatgtcagcgaagaagaggtgacgaccggactggatcgctttgcagctgcttgcgaacactttgttagccgaggttcatcatgatggtcatccgtcccgttgagcgatcagatgtctcggcgctgatgcagcttgccagcaaaacgggcggcggcctgacgtcgcttcccgccaatgaagccacgctttcggcgcgtatcgaaagggcaatcaaaacctggcaaggcgaactgcccaaaagtgagcagggctatgtgttcgtgctggaagatagcgagacaggcaccgtggcggggatttgtgccattgaggtggcggttgggctgaacgatccctggtacaactatcgcgtcggcacgttggttcacgcctcaaaagagctgaatgtctataacgcattgccgacgctgtttctcagtaacgatcacaccggcagcagcgagctgtgcacgctgtttctcgacccggactggcgcaaagagggcaacggctatttgctgtcgaaatcgcgctttatgtttatggcggcttttcgcgacaagtttaatgacaaagtggttgctgaaatgcgcggggtgattgacgaacacggctattcaccgttctggcaaagcctcggtaaacgcttcttttcgatggattttagccgcgccgattttctctgcggcaccgggcaaaaggcatttattgcagaactgatgccgaaacatccgatctatacccactttttatcccaggaagcccaggacgtcatcggtcaggtacatccgcaaaccgcgcctgcccgcgcggtgctggagaaagaaggttttcgttaccgcaactatatcgacatcttcgacggcgggccaacgcttgagtgtgacatcgaccgcgtgcgcgccattcgtaaaagtcggctggtggaagtggcagaagggcagcctgcgcagggcgattttccggcctgcctggtcgccaatgaaaattatcaccatttccgcgtggtgctggcgcgtaccgatccggcaaccgagcgtttgattttaaccgccgcacaactggatgccctcaaatgccacgcaggggatcgcgttcgtctggtgcgcctgtgcgcagaggagaaaacagcatgactttatggattaacggtgactggataacgggccagggcgcatcgcgtgtgaagcgtaatccggtatcgggcgaggtgttatggcaaggcaatgatgccgatgccgctcaggtcgggcaggcttgtcgcgcagcccgtgcggcgtttccgcgctgggcgcggctctcattggctgaacgtcaggtcgttgtcgaacgctttgccggattgctggaaaggaataaaggcgaattaaccgcgattattgccagagaaacgggtaagccgcgctgggaagcggcaaccgaagtgacggcgatgatcaataaaatcgcgatatcaattaaggcgtatcacgttcgtaccggcgagcagcgtagtgaaatgccggacggtgcggcgagcctgcgacatcgcccgcacggcgtgctggcggtgtttgggccgtataatttccctggtcatttgccgaacggacatatcgttccggcattgctggcaggtaacaccattatctttaaacccagcgaactgacaccgtggagtggcgaagcggtaatgcgtttatggcagcaggctggcttgccgccgggcgtacttaacctggtgcagggcgggcgtgaaacgggtcaggcgctgagtgcgctggaggatctcgacggtttgctgtttaccggtagcgccaataccggctaccagctgcatcgccagctctccggtcagccggagaaaattctcgcccttgagatgggcggtaataatccgctaattatcgatgaggtggcggatatcgacgcggctgtccatctgaccattcagtcggcgtttgtcacagccgggcaacgctgcacctgcgcccgccgtttattgctcaaaagcggagcgcagggcgatgcgtttcttgctcgtctggttgccgtcagccagcgattaacgccgggcaactgggatgacgaaccgcagccgtttattggcgggctgatttctgaacaggccgcacagcaggtggttactgcctggcagcaactggaagcgatgggcggacgaaccctgcttgcgccgcgcttattacaatcagagacatcgttgctgacgccggggatcattgaaatgacaggcgttgctggcgtaccagatgaagaggtgttcggaccgttattgcgcgtctggcgttatgattctttcgaggaagcgattctaatggcgaataacactcgcttcggactctcttgcggtctggtttcccccgagcgggaaaaattcgatcaactgttgctggaggcgcgggcggggattgttaactggaacaaaccgcttactggtgctgccagtaccgcgccattcggcggcattggtgcatccggtaaccatcgccccagcgcctggtatgccgcagattactgcgcatggcctatggcgagcctggagtcggactcgttaactttgcccgcaacgcttaaccccgggctggatttttccgatgaggtggtgcgatgaacgcctgggaagttaatttcgacgggctggtagggctgacgcatcattacgctggcctgtcgtttggtaatgaagcctctacccgtcaccgttttcaggtgtctaacccgcgacaggcggcaaaacagggcttactgaaaatgaaagcccttgccgatgcgggattcccccaggccgtgatcccgccgcacgagcgtccgtttattccggtgctgcgtcagttgggattcagtggtagcgatgagcaggtactggaaaaagttgcacgccaggcaccgcactggctttccagcgtcagttccgcttcgccaatgtgggtagccaatgcggcaacgatcgcgccatctgccgatacgctggatggcaaagtgcatctcaccgttgccaacctgaacaataaatttcaccgctcgctggaagcgcacgtcaccgaatcacttttaaaagcgatttttaacgacgaagagaaatttagcgttcattcggcgttgccgcaggtagcgttgctcggtgatgagggggcggcaaaccacaatcgtctcggcggtcattacggtgagccgggtatgcaactttttgtctacgggcgagaagaaggcaatgatacccggccttcccgttatccggcgcgacagactcgcgaagccagcgaggcggtggcaaggctgaatcaggtgaatccccaacaggtgattttcgcccagcaaaacccggacgttatcgaccagggcgtttttcataatgacgtgattgccgtgagtaaccgccaggtgctgttttgccaccaacaggcgttcgctcgccagtcacagttactggcaaacctgcgtgcgcgggtgaacggttttatggcgatagaagttccggcaactcaggtttccgtgtcggatgcggtgtctacctatctgtttaacagccaactgttgagccgcgatgatggttccatgatgttggtgctgcctcaggagtgtcgggaacacgccggagtatggggttatctcaatgaactccttgccgctgacaacccgattagcgaactaaaagtctttgatttacgtgaaagcatggcgaatggcggcggcccggcgtgcctgcggttgcgggtggtattgacagaagaagaacgccgggcggtgaatccggcggtgatgatgaacgatacgctgtttaatgcgctcaatgactgggtggatcgttactaccgcgatcgccttactgctgccgatctggccgacccgcaattgctgcgcgaagggcgggaagcactggatgtattgagccaattactgaatctcggtttggtctatccgttccagcgggagggagggggcaatggataattttcttgctctgaccttaacgggtaaaaaaccggttatcaccgagcgagaaatcaacggcgttcgctggcgctggctgggcgatggtgtgctggaactgacgccattaacgccaccgcaaggcgcactggtgatttcagcgggaatacacggtaatgagacggcacctgtggagatgctggacgcgttgcttggcgcgatatctcacggcgagatcccgttacgttggcggttgctggtgatcctcgggaatcctcctgcgctgaagcaagggaaacgttattgccatagcgatatgaatcgaatgtttggcggtcgttggcagctatttgctgaaagcggagaaacctgtcgggcgcgcgaactggaacagtgcctggaagatttttatgaccagggcaaagaatctgtgcgctggcaccttgatctacataccgcaattcgtggctccttgcatccgcagttcggtgtattaccgcaacgcgacattccctgggacgagaaatttctgacgtggctgggtgcggcggggctggaggcgctggtgttccatcaggaacctggtggtacgtttacccatttcagcgccagacattttggcgcgctggcctgtacgctggaacttggcaaagcgttgccctttgggcaaaacgatcttcgccagtttgcagtaactgccagcgcaattgctgcgctgctatctggtgagagtgtcggtatcgtgagaacaccgccgctccgttatcgggtggtttcgcaaattactcgccactcgccgtccttcgaaatgcatatggcaagtgacacgctgaattttatgccgtttgagaaaggaacattgctggcgcaggacggagaggaacgttttaccgtaacccatgatgtagagtatgtgttattccctaatccgttggtagcgttgggattacgcgcgggattaatgctcgaaaaaataagctaatacttacccgcagaaatcattctgcgggtattaagttgctttcttataaattaatacagattaatcctggttatttgctttatttatcaccagtcatccggtatagttcttcataatctctgcaaaatcatcgtgttgtattattctctcatcactctccatcaaattttctttttttctccataattggcgcaaaagtgttttttacactttcattgttttaccgttgctctgattaattgacgctaaagtcagtaaagttaatctcgtcaacacggcacgctacttaagaaagccgtaataaataactgaaaggaaggatatagaatatgcgtaaattaactgcactgtttgttgcctctaccctggctcttggcgcggctaacctggcccatgccgcagacaccactaccgcagcaccggctgacgcgaagccgatgatgcaccacaaaggcaagttcggtccgcatcaggacatgatgttcaaagacctgaacctgaccgacgcgcagaaacagcagatccgcgaaatcatgaaaggccagcgtgaccagatgaaacgtccgccgctggaagaacgccgcgcaatgcatgacatcattgccagcgataccttcgataaagcaaaagctgaagcgcagatcgcaaaaatggaagaacagcgcaaagctaacatgctggcgcacatggaaacccagaacaaaatttacaacatcctgacgccggaacagaaaaagcaatttaatgctaattttgagaagcgtctgacagaacgtccagcggcaaaaggtaaaatgcctgcaactgctgaataatctttcagccaaaaaacttaagaccgccggtcttgtccactaccttgcagtaatgcggtggacaggatcggcggttttcttttctcttctcaaacagttgtaaaaaaagcctgatcaccactaacgtaaatcacccgagttgccgataaccatccacggttacctgaacgataacaatgaaaagaacgggccgggagcgagtatggaatactttgatatgcgtaaaatgtcggtgaatctgtggcgaaatgctgccggtgaaacgcgcgaaatttgcactttcccaccggcaaaacgtgatttttactggcgtgccagcattgcatccatcgcggcgaatggggagttttctttgtttcccggcatggaaaggatagtgacgttgctggaaggcggcgagatgctccttgaaagcgcagaccgctttaaccataccttaaaaccgttacagccttttgcctttgcagcggaccaggtggtaaaagcgaaactgacggcagggcagatgtcgatggatttcaacatcatgacacgcctggatgtctgtaaggcgaaagtcagaattgccgaacgtacgtttactacctttggctcacgcggcggggtggtgtttgtgattaacggggcgtggcaactgggcgataaattgctcactaccgaccagggcgcgtgctggttcgatggcaggcacaccctgcggcttttacaaccgcaaggtaaactgttgttcagtgaaatcaactggctcgctggtcattcgccggatcaagttcagtaatttcatagttaccggaaagcagcggcttacaaagaattttataaccgtcgtgatcaaacccggcgggtgtccgaattaacgttgtcgcgtcttccagcgaattaaccgcccccagccacagccagttttgaataatatgatattgagtcatttccgggtgctgttctttcagcgccaccgccccttgccaaggccaacacaccacccgcaaacgctccagagactggcgcaagcgtagcgcatgttcctcatggctctctttaccgcagcatgctccggcgcaacgttttagcgctgaacgaaaacatgcacgaccgcgacttaacggttccagtcccagcaggccataacaaagtttttgttcatcagcgatgctctgcaatgcttgcaaagctgcgcgcctattggcaaacaggccaaacaggttgggggctcgtgaaaaatccacctctttggcatacaccacatcgacgcgcttttcatttaattgtagggcacagagctggcgattgcggcgcaaccgtttattaaacagcggctgttgttctttgattaatcgcgcttcaaggagcagagcgccgatttcgcctgcggtgcagatccagctaattcgccgggattgccgtagcatggcggcttcatccggggtgcgtaaatgagaaagcacccgactgcggatattaacgcttttgccgatatagagcggcatggtgtcactttcgccatgaaacagatacacccctggtcgggtgggtaagtcattaaggaatgaacgtaaatgttcgggatattcataaattgccgcagcttcaaattcgagccgcggagaagttaaacggcgtaccactgttgactccgaatgctggttatctatccagtgtaacaggcgggaagcgattaaaaaagaggcgggtcgatgacaaaggttacaccgtctgacgtgctacgcctgtcaggcctattcgactcctgcaatatattgaatttgcatagttttgtaggtcgaataaggcgttcacgccgcatccggcgtgaacaaattactctttttcgcacaaaccattatgtgcaaattattactttttccagaaatcatcgaaaacggtaattggcggacggcgtttatgttcggttttcagataccagttctctattgttctggcgacctgttcaggtacgtttttcccttccagatagtcgtcgatattgtcataggtcacgccgagtgccacttcatctggcagagaagggcgatcatcttccagatcggccgttggggctttcttataaaggtgttccgggcaacctaatgccgtcagcaactgtttaccctggcgtttgttgagacgatacagcggattaatatccgtaccgccgtcaccatatttagtgaagaatccggtaatggcttctgctgcatgatcggtgcccaccacgacaccgctggtcatacccgcaatgctatattgtgctttcatccgctcacgcgctttttcattgccacggacaaaatcgctcagttcaatgcctgcttcccgcaatgcctgctcgctagccaataccgcgcccttgatattaacggttaatacgcgatccggttgaataaaggcaatggcatcctggcaatcttgttcgtcagcctgaacaccatagggcaggcgtacggcaataaattgcagtgattcgttgccagtttcctggcgcagctcattaatcgccatctggcacagctttccggcaagcgtggagtcctgaccgccgctgatcccgagcaccagtgatttaatgaacggataagtttgcaggtagcttttcagaaaatcgacactacgacgaatttcctcttcagcattaatctgcggttttgcgcccagcgcctttattatttgttgttgcaatgtcattgaacccctccagacagaaaagacaaaacttccttaaagctaacccgttgctactgaaacgacaagcgacagcgggctgaatggtggttaaaacgtcatacaggaatcctctgaaagcggagccgtttcgttcacgggcttgaaaaagcgcccaatgtattccaggcttatctaacacgctgataaacaagaggacggaatatgaacaagaatatggcaggaattctgagtgcagcggcggtattaaccatgctggcgggttgtacggcttatgatcgtaccaaagaccagtttgtacagcctgtggtgaaagacgtcaaaaaaggcatgagccgggcgcaggttgcacaaattgcgggtaaaccttcgtctgaagtgagcatgatccatgctcgcggtacttgccagacctacatcctgggtcaacgtgatggtaaagcagaaacctactttgtcgcgttagatgataccggacatgtcatcaactccggtta

SEQ ID NO: 295 - DNA, 12619 bp, Escherichia coli
  source 1..12619: mol_type = genomic DNA
acggaaatgattacttatctctcggttactacgatcaggacgactaccacattcaaagaggaattcgtattaatggtgatagtctctcacccaatattgtagtgaaaaagccaggaatgcttcagcgtggtttgaaagcagtaaagctatcatggcagaatcatttgcaacaggttccgatcatcaggttataaacgagctcaacggggaaagactgagagaacctaacgaagtttttaaacgtttaggtcgagcaataagatataattttcaagtggacgatgcaaaatttagacgcgacaatgtaaaagaaataatttctaatttattcgctaacaaagttgacgttgaccatcctgaaaataaacacaaagactttaaggatctcgaagataacgttgaaaaaagacttcaaaatcgccaggcgaaatatcaaaatgaaattaatcaactatctgcgccaggtgttaattttgatgatatttaaaattatttttccagttttttgatttttcaacgcctgaatatcggaaatagtcagtgacgaacatcagtatttttacatcattacgtccgggtcattgtcggtttatctccttttacttgtggtaattgagggataacaacaaaaaaggtgagttttgcgactcaccttttttatttgtttcttattcagaatcaatatcttttaaatcatcctgaatcgcttgtgcgttcggattttcctgcggtttgagttcgccgccattagcgatgaaatcatgacgctggaagtacgcttcgcgcaccataatataaggatcggacgactgacgcagcagaccatcggaatccaacaactgcgcacgagtttctatcccttcaagcgtccatttacccacagacatcggccaggtcagccaggaaagaaccgggtaaagaccatccgccatatcaccaccgtcatcacgcagcgtgaagctaccgtagaacggtaactggacgtaaggcccataacccacgccataatgaccaagcgtactaccgaagcggtgaggttcagtccgttgcagtttcgggttcgccatccctgcaacatcaataaaaccgcccatccccaaaatggtgttcaggaaaaagcgggtaaagtggaccatcccctgataagggtcgccctgcaagaagtagttaaccatcaccgcaggttcttcaaggttgccagtaaagttgctcaaaccattacgcgccggttgcggaacataatcacgccaggcgacagcgaccggtcgaacaatatacgggtctaatacgttgaagttgaagttgtacatggtgcggttgaacccttctaacgggtcagaacgcccttgctgatctgtaccggaactcgcacaccccaccagaagcgtagttcccagagcaagcgccgacaggcgaagcttcataaatgtctccctgttttttttatggcttatgcagtttgccatccatgacggaacgataccgtatccgcctgtttaggtgtgggcgattgtaacagcacgtcaactgatgtccagacgccctgatttgctgatttgatcatagcctggtaatcgccgccctgtaggctacttgattctatagaaacagaaaaaggcaaacgcagccttttctacattttcagagtaactcccgccagttgcgagcaaaaaagccgctacgctttagctatacgtgctaattcaagagaagaggccatggacaacgacaaaattgatcaacacagcgacgaaattgaagttgagagcgaagaaaaagagcgcggcaaaaaaatagaaatagatgaagaccgactcccctcccgggcgatggcaattcatgagcatatccgccaggatggtgaaaaagagctggaacgcgacgcaatggcgctactgtggtcagccattgcggcgggtctgtcgatgggcgcttcgttactggcaaaagggatatttcatgtcgaactggaaggtgtgccgggcagcttcttactggagaatctcggttatacctttggttttattatcgtcattatggcccgccagcaattatttaccgaaaacaccgtgactgcggtactacccgtcatgcaaaaaccgacaatgagcaacgtcggcttacttatgcgattatggggcgtcgtgctgctgggtaatattctcgggacaggtattgctgcatgggcatttgaatatatgcctatcttcaatgaagaaactcgcgatgcatttgtcaaaatcggcatggatgtgatgaagaacacccccagcgagatgtttgccaacgcgatcatttccggctggctgatcgccactatggtatggatgtttcctgcagcaggtgcggcaaagattgtggtgattatattgatgacctggcttattgccctgggtgacaccacccatatcgtggtcggttctgttgaaatcctctatctggtgtttaacggtacgctgcactggagcgatttcatctggcccttcgcactacctactttagcggggaacatctgcggcggcacctttatcttcgcgttaatgagtcatgcacagattcgtaacgacatgagcaacaagcgtaaagcagaagcacgccaaaaagcagaacgtgcggaaaacattaagaaaaatgataaaaacccggcataaatggcgagggtttaagcaatcgagcggcagcgtacttaccccgcactccattagcgggtatactcatgccgcattgtcctcttagttaaatggatataacgagcccctcctaagggctaattgcaggttcgattcctgcaggggacaccagatacccttcaaacgaaatctaccttcaccccgtaaaagatgggtttggcagcacacttgccttatatctactcatttttactgcaacaggttgaaatctcagcactgtcagaaagcgctgatgactaaacagccctgggccgggcgatgtaaccatcacacagaatcctgatagcgaaatatggcgtgactcgatacttcactccgcaatgcattccttgatgaattcgcaggaccgtgatacacgggacaggtcactgaatgacgacaatgtcctggaaatcagcgaaccgcgcatctgaagtacatttgagcgactgtaccagaacatgaatgaggcgtttggattaggcgattattagcagggctaagcattttactattattattttccggttgagggatatagagctatcgacaacaaccggaaaaagtttacgtctatattgctgaaggtacaggcgtttccataactatttgctcgcgttttttactcaagaagaaaatgccaaatagcaacatcaggcagacaatacccgaaattgcgaagaaaactgtctggtagcctgcgtggtcaaagagtatcccagtcggcgttgaaagcagcacaatcccaagcgaactggcaatttgaaaaccaatcagaaagatcgtcgacgacaggcgcttatcaaaatttgccacgctgtatttgaagacggatatgacacaaagtggaacctcaatagcatgtaacagcttcactaatgaaataatccaggggttaacgaacagcgcgcaggaaaggatacgcaacgccataatcacaacaccgataagtaatgcattttttggccctacccgattcacaaagaaaggaataatcgccatgcatagcgcttcgagtaccacctggaatgagttgagataaccatacaggcgcgttcctacatcgtgtgattcgaataaacctgcataaaagacaggaaaaagttgttgatcaaaaatgttatagaaagaccacgtccccacaataaatatgacgaaaacccagaagtttcgatccttgaaaactgcgataaaatcctctttttttacccctcccgcatccgccgctacgcactggtgatccttatctttaaaacacatgttgatcatcataaatacagcgccaaatagcgagaccaaccagaagttgatatggggactgatactaaaaaatatgccggcaaagaacgcgccaatagcatagccaaaagatccccaggcgcgcgctgttccatattcgaaatgaaaatttcgcgccattttttcggtgaagctgtcaagcaaaccgcatcccgccagataccccaggccaaaaaagagcgcccccagaattagacctacagaaaaattgctttgcagtaacggttaataaacgtaaatcataaacggtccggtcaagaccaggatgaaactcatacaccagatgagcggtttcttcagaccgagtttatcctgaacgatgccgtagaacatcataaatagaatgctggtaaactggttgaccgaataaagtgtacctaattccgtccctgtcaaccctagatgtcctttcagccaaatagcgtataacgaccaccacagcgaccaggaaataaaaaagagaaatgagtaactggatgcaaaacgatagtacgcatttctgaatggaatattcagtgccataattacctacctgtcgttaaaaaattcacgtcctatttagagataagagcgacttcgccgtttacttctcactattccagttcttgtcgacatggcagcgctgtcattgcccctttcgccgttactgcaagcgctccgcaacgttgagcgagatcgataattcgtcgcatttctctctcatctgtagataatcccgtagaggacagacctgtgagtaacccggcaacgaacgcatctcccgcccccgtgctatcgacacaattcacagacattccagcaaaatggtgaacttgtcctcgataacagaccaccaccccttctgcacctttagtcaccaacagcatggcgatctcatactcttttgccagggcgcatatatcctgatcgttctgtgtttttccactgataagtcgccattcttcttccgagagcttgacgacatccgccagttgtagcgcctgccgcaaacacaagcggagcaaatgctcgtcttgccatagatcttcacgaatattaggatcgaagctgacaaaacctccggcatgccggatcgccgtcatcgcagtaaatgcgctggtacgcgaaggctcggcagacaacgcaattgaacagagatgtaaccattcgccatgtcgccagcagggcaagtctgtcgtctctaaaaaaagatcggcactggggcggaccataaacgtaaatgaacgttccccttgatcgttcagatcgacaagcaccgtggatgtccggtgccattcatcttgcttcagatacgtgatatcgactccctcagttagcagcattctttgcattaacgccccaaaaggatcatcaccgacccgacctataaatccacttattccgcctaatctggcgattcccaccgcaacgttagctggcgcgccgccaggacaaggcagtaggcgcccgtctgattctggcaagagatctacgaccgcatcccctaaaacccatactttggctgacatttttttcccttaaattcatctgagttacgcatagtgataaacctctttctcgcaaaatcgtcatggatttactaaaacatgcatattcgatcacaaaacgtcatagttaacgttaacatttgtgatattcatcgcatttatgaaagtaagggactatatttttataaaagttaacgttaacaattcaccaaatttgcttaaccaggatgattaaaatgacgcaatctcgattgcatgcggcgcaaaacgcactagcaaaacttcatgagcaccggggtaacactttctatccccattttcacctcgcgccacctgccggatggatgaacgatccaaacggcctgatctggtttaacgatcgttatcacgcgttttatcaacatcacccgatgagcgaacactggggaccaatgcactggggacatgccaccagcgacgatatgatccactggcagcatgagcctattgcgctagcgccaggagacgataatgacaaagacgggtgtttttcaggtagtgctgtcgatgacaatggtgtcctctcacttatctacaccggacacgtctggctcgatggtgcaggtaatgacgatgcaattcgcgaagtacaatgtctggctaccagtcgggatggtattcatttcgagaaacagggtgtgatcctcactccaccagaaggaatcatgcacttccgcgatcctaaagtgtggcgtgaagccgacacatggtggatggtagtcggggcgaaagatccaggcaacacggggcagatcctgctttatcgcggcagttcgttgcgtgaatggaccttcgatcgcgtactggcccacgctgatgcgggtgaaagctatatgtgggaatgtccggactttttcagccttggcgatcagcattatctgatgttttccccgcagggaatgaatgccgagggatacagttaccgaaatcgctttcaaagtggcgtaatacccggaatgtggtcgccaggacgactttttgcacaatccgggcattttactgaacttgataacgggcatgacttttatgcaccacaaagctttttagcgaaggatggtcggcgtattgttatcggctggatggatatgtgggaatcgccaatgccctcaaaacgtgaaggatgggcaggctgcatgacgctggcgcgcgagctatcagagagcaatggcaaacttctacaacgcccggtacacgaagctgagtcgttacgccagcagcatcaatctgtctctccccgcacaatcagcaataaatatgttttgcaggaaaacgcgcaagcagttgagattcagttgcagtgggcgctgaagaacagtgatgccgaacattacggattacagctcggcactggaatgcggctgtatattgataaccaatctgagcgacttgttttgtggcggtattacccacacgagaatttagacggctaccgtagtattcccctcccgcagcgtgacacgctcgccctaaggatatttatcgatacatcatccgtggaagtatttattaacgacggggaagcggtgatgagtagtcgaatctatccgcagccagaagaacgggaactgtcgctttatgcctcccacggagtggctgtgctgcaacatggagcactctggctactgggttaacataatatcaggtggaacaacggatcaacagcgggcaagggatccgcgtcactcttcccccttcacgaccttcaataatatgcaatgcagcttcccgcccgataatgtcatgtggaagctgaattgtggtcagcggcggtaaaaacagatgcccgacgccaaccagattatcaaagcccattacggcgacatcctgcgggattcgtacccccttcgccagaagaacctgataagccacaaaggctgcgcgatcgttaccacatatcagaacatcaaaatctggtttgcccgatttgaagtggtcattgagtaaacttgcgagatcggtgtagtgatcatcacctgttgccatgtgaaattgtttcacctcagccagatctcgtccagcatcacgccaggcctgctcaaatccctgccgacgataccctgttgccaacgcactttccggtagccagaagcataacggttgacgatagcccgccgcgagcaaatgctgtgttgattcatattgtgcagtgtaatcatcagggatataactgggtaacgctgggtcatccgccacacagttcgccaatacaatattttcaccatacagagactcaggcagcgtgatatgtcgcagccccattgtagtatagataatgccatccggacggtgggcaagcagctgacgtgccgcgcgggcagcgtcatcttcagaaaaaatattgattaaaaaactattccagccgaactcgctggcggtttgctcaatggcaagcagaatatcaacagagaaaggagtggtagccgtgtcctgcgccagcacggcgagagtcgacggcttacgtccttgagcgcgcatcttacgggcggaaagatcaggaacataattcagggtctggattgcctgcaatacgcggtcacgcgttgcaggacgcacagattctgcattatgcatcacccgggagactgtcatcatcgacactcccgccaggcgtgcgacatcctttaatgaagccatacccaagccgtttgccgtaaaacgggcactgtagcagaaacagacgtcactggcgagatccaacgatattctcaacgccctatcacccgacacggcaatacaataaaaaataacaataattgccggataattgtactcaattccgcctctgttctcgccaacgagtaaccatataggcaagtaagtaaaacatgccaactggcatcgccaacctggagaagaaaatataaatatggatcattgtgctgccgctgtatcccgacatcagcccggaaattattgcgattgctatcggttcaggtgcaattggctgcacgatcgttacggactcgcttttctggctagtgaagcaatattgcggcgctacgctcaatgaaacatttaaatactatacgacagcgacatttatcgcttcagtcgtcgctctggcgggcacattcctgctgtcatttatcatctaagcgcaaagagacgtactatggaaaacgctaaaatgaactcgctcatcgcccagtatccgttggtaaaggatctggttgctcttaaagaaaccacctggtttaatcctggcacgacctcattggctgaaggtttaccttatgttggcctgaccgaacaggatgttcaggacgcccatgcgcgcttatcccgttttgcaccctatctggcaaaagcatttcctgaaactgctgccactggggggattattgaatcagaactggttgccattccagctatgcaaaaacggctggaaaaagaatatcagcaaccgatcagcgggcaactgttactgaaaaaagatagccatttgcccatttccggctccataaaagcacgcggcgggatttatgaagtcctggcacacgcagaaaaactggctctggaagcggggttgctgacgcttgatgatgactacagcaaactgctttctccggagtttaaacagttctttagccaatacagcattgctgtgggctcaaccggaaatctggggttatcaatcggcattatgagcgcccgcattggctttaaggtgacagttcatatgtctgctgatgcccgggcatggaaaaaagcgaaactgcgcagccatggcgttacggtcgtggaatatgagcaagattatggtgttgccgtcgaggaaggacgtaaagcagcgcagtctgacccgaactgtttctttattgatgacgaaaattcccgcacgttgttccttgggtattccgtcgctggccagcgtcttaaagcgcaatttgcccagcaaggccgtatcgtcgatgctgataaccctctgtttgtctatctgccgtgtggtgttggcggtggtcctggtggcgtcgcattcgggcttaaactggcgtttggcgatcatgttcactgcttttttgccgaaccaacgcactccccttgtatgttgttaggcgtccatacaggattacacgatcagatttctgttcaggatattggtatcgacaaccttaccgcagcggatggccttgcagttggtcgcgcatcaggctttgtcgggcgggcaatggagcgtctgctggatggcttctatacccttagcgatcaaaccatgtatgacatgcttggctggctggcgcaggaagaaggtattcgtcttgaaccttcggcactggcgggtatggccggacctcagcgcgtgtgtgcatcagtaagttaccaacagatgcacggtttcagcgcagaacaactgcgtaataccactcatctggtgtgggcgacgggaggtggaatggtgccggaagaagagatgaatcaatatctggcaaaaggccgttaataacgtttcaacgcagcatcgcaatcctttccctgggtgagcgatgctgccgatggcgcagacttaagatccccggtcttacccgctataaccccctccttttatcatcacccaatgcctttcgctgtaaacggcggtttcgcaaaccaaaccaaaaccgtaagtaagataaaagcaatagccgccatacggaaaatctcatttgcagaaatagaaagtgactgctgggttatttcattattaatttcattaagaactcctgaaagcgaaccatagtatttatccataatttgtgacgatgaattaaacacggggttaaattgatcgatggttgctgtcaactgactatggtgtaacgattcgcgtcgtccccacagcgtcattgtcaacgacgtaccaactgatcctgacaaggtacgaaaaaaattactcatactcgaggcattggcaaatttattatctggcaagcctgaaaacgaaatcgttgttaagggtaaaaagaaacaggcaacggcgaatccctgaaaaaactgcggcaaaatgatgcctgtaaaatcaatcgttggcataaatgtcacagaacgccagtaatagcaaaccgcatacatcaaaaaactaaatgtcactaacaaccgcatgtctattttgttgccataacgtcctatcaaaggtgaaattaatagtggcatgatgccgatgggcgcataagcaagtccggcccatatcgcattataccccatcgtttcctggagtaactgcggcataaggacgatcgctccagagtaaaataaatacgcgcatgtgatactcacaataccaatggtgaagttacgggacttaaacaaactgagatcaagaatcgggttctctgaggtcgactcccaaatgactaaagagatcagagaaataactgatactactgttaatattattattgtactcgagttgaaccaatccagatcgcgccctttatcaagcataatttgcaagccaccaacaccgagcactaacagggtcagtcctggtagattcattttgaccggtgaagtctcagtttctcttcctttaagtaaggttaagcataatgtcaggacgataatccccatagggacattgattaaaaatatccaaccccagctaaagttatcacaaatataaccgcccaatatcggcccacatatcggagcgataatcacggtcattgaccataatgccagagcaaatgttcttttttctggcggataattccttaataataaactctgtgacagtggaattaacggccccgccattaacccctgaacgactctaaaaaatatcagcacatcaagattggtcgataggctacacattaatgaagacagcgaaaaaaaggttactgaaagtaaaaataatcttaattcgcctattctttgtgccaacctgccagtaacagggatcgcaatggcatttgctacaccaaacgaggtgataacccaggtgccttcgtctgttgatgctcccagaaagccagatattgtcggtattgcgacgttagaaatagtggaatccaacatttgcataaatgtcgctaatgacaatgcaatagtgacgcaccataacgtcccaccggttaatggtgccggagttgatttagtgattgccattaaaattgtccattatgcgaaataatgttgctaatttctttttctatcggactggtatcgataactaaagccttactggtataagccggcatggaggtcacggttgaagccagctcaggcatctcggcaatgtcttcgttcttcgtatcaatagttgctgtcatcgataaaccaatacgcaagggatgttccatgagttcttttggatcaagagaaacttcaaccggtacacgctgaacgattttgatccagttccctgtcgcattttgtgcaggtaataaggagaacgcattgccggttcccatattgatccctgtcacccgaccatgaaacacaacattttcaccataaagatcgctgataatattgaccgattgaccaatccgtacatccgtgagttgtgtttctttaaagttggcattaacccacatttgacgtgccggtacgacagccattaacgattgtccggggctcactgtttcgccgacctgaacacttcgctgggcaatatagccggtaaccggactcttaatatccgtacgtttaagcgccaaccaggcttctttagttgcatccgccgcttcaacgacttgtggctgacggtttaatggtgtgttcattactaaagctttattcgctttataagcctggatagcggcattcaatgccgctttgctacttattaacgtatctttggtatgctccagcgtttcttttgaaataaccccctgcttcgctaacggcactcgacggttataatcttctaaagattgttgatactgaatacgtgctgaagcgacttcggcactgtattgtttatcctgtaagtatagtttattcgtttgccgaacaatatttgccagattatttttagctttattgagtgcgatagtggcatcagttttatccagtgaaactaaaatgtcaccttgtcgaacgtagttcgtatctttatgattaacgacagtgacactacctgagacttgtgcagaaattggatctgcattccccgtgacataggcgtcatctgtactaatc

SEQ ID NO: 296 - DNA, 12615 bp, Escherichia coli
  source 1..12615: mol_type = genomic DNA
atcagacgggagatcgcttcaatgccacccttgcccaccagccgcataattgcgccggagctgcgtaggcttccccacaaaataaccgccaccaggaaaaagatcagcggcggcgcaaccatcagtacccaatcagcgaaggttgaactctgacgcactgtggacgccgagctaataatcatcgctatggttcccggaccagcggtacttggcattgctagcggcacaaaggcaatattggcactgggttcatcttccagctcttccgacttgcttttcgcctccggtgaatcaatcgctttctgttgcggaaagagcatccgaaaaccgataaacgcgacgattaagccgcctgcaattcgcagaccgggaatcgaaatgccaaatgtatccatcaccagttgcccggcgtaatacgccaccatcatgatggcaaatacgtacaccgaggccatcaacgactgacgattacgttcggcactgttcatgttgcctgccaggccaagaaatagcgcgacagttgttaatgggttagctaacggcagcaacaccaccagccccaggccaattgctttaaacaaatctaacattggtggttgttatcctgtgtatctgggttatcagcgaaaagtataaggggtaaacaaggataaagtgtcactctttagctaaccttgcatcgcattgaccaaaacttgaaccgatttagcaaaacgtggcatcggtcaattcattcatttgacttatacttgcctgggcaatattatcccctgcaactaattacttgccagggcaactaatgtgaaaagtaccagcgatctgttcaatgaaattattccattgggtcgcttaatccatatggttaatcagaagaaagatcgtctgcttaacgagtatctgtctccgctggatattaccgcggcacagtttaaggtgctctgctctatccgctgcgcggcgtgtattactccggttgaactgaaaaaagtgttgtcggtcgacctgggagcactcacccgtatgctggatcgcctggtctgtaaaggctgggttgaaaggttgccgaacccgaatgataagcgcggcgtactggtaaaacttaccaccagcggcgcggcaatatgtgaacaatgccatcaattagttggccaggacctgcaccaagaattaacaaaaaacctgacggcggacgaagtggcaacacttgagcatttgcttaagaaagtcctgccgtaaacaaaaaagaggtatgacgatgtccagacgcaatactgacgctattaccattcatagcattttggactggatcgaggacaacctggaatcgccactgtcactggagaaagtgtcagagcgttcaggttactctaaatggcacctgcaacggatgtttaaaaaagaaaccggtcattcattaggccaatacatccgcagccgtaagatgacggaaatcgcgcaaaagctgaaggaaagtaacgagccgatactctatctggcagaacgatatggcttcgagtcgcaacaaactctgacccgaaccttcaaaaattactttgatgttccgccgcataaataccggatgaccaatatgcagggcgaatcgcgctttttacatccattaaatcattacaacagctagttgataacgtgacaacgtcactgaggcaatcatgaaaccactttcatccgcaatagcagctgcgcttattctcttttccgcgcagggcgttgcggaacaaaccacgcagccagttgttacttcttgtgccaatgtcgtggttgttcccccatcgcaggaacaaccaccgtttgatttaaatcacatgggtactggcagtgataagtcggatgcgctcggcgtgccctattataatcaacacgctatgtagttattgtcaggctctgatcacagagcctgacatctccgtaatatcttcctcaagtctcaaatattttcgccattgttggcgatgagatcccgatactagtaaaacgacgctttacgtatccgttccagcgttcccttcccttcgttgtctttatcgacataaatcattccgtagcgctttttcatttcccctgttccggcagaaaccaggtcaatgcagccccacggggtgtagccaattaagtcaacaccatcttcaactacggcttttttcatttcccgaatatgggaagcaaagtaatcaatgcgatagtgatcgttcaccgtgccgtcagcttgtctctggtcaaccgcaccaaatccattttcgacaataaacagcggcaactggaaatgatcccagaaccagttgagtgaataacgtagccctgccggatcaatttgccatccccattcggatgtatcgatataagggttgctgaccaaatctcgtggttcaacataatccagttgcgggttatcgggcgaaaattgtgtcgtaaaagacatgtagtagctaaagccgataaagtcgacacaaccactggcaagaatcgcgttatcttctggtgtgatatcgaggttgaatcctttcctggcaaagtaattcagcatatgttgcggataatatccacgagcatgaacatcagtaaaccagtaacgacgatgcattgctttcgtggccatcatcatatcgttgggtgcacacgtcagaggatagatgggacacatggcgatcatacagccaatgttaaattcaggattgatcgattttccagtctgtaccgccagggcactggcaactaactcgtaatgtaccgcctggtacattatttgttcgcgctcattgatatcttcctctggcgaatacaagataccggaattagtaaatggacacaggctttcgctgaaattcacctgattattgatttcgttaaacgtcatccagtactttactttttctttatagcgcgtgaagaccgttgatgcgaagcggataaaaaagtcgatcagtttacggtttcgccagccaccatattttgtcaccagatgataaggcatctcaaaatgtgaaagcgtcaccacaggttccattccctgcttaaggcattcatcgaacagatcatcataaaattgtaaaccctcttcattcggctcctgttcgtcaccttgcggaaagattcgtgtccaggcaatggaagttcgaaagcatttgaatcccatctcggcaaataactgaatatctgttttatagcgatgataaaaatcaattgcttcatgattgggataattaagcccgtcgataacgccttctgtcacttcacgcggcaccccgtgagcgccagcagtcatcacatcagcgatgctgatgccttttcctccttcattccagccaccttccaactgatgcgcggctaccgcaccgccccataaaaaaccttttttaaatcctgacatacacaactccttaactaaaatagattaccaccagacttccgcctggatgccggccataaactcgtctttgctgttctcattaaacttaaaattcgataattcgttatccagaatattgatatacgttccatagaagcgaatttctggtcgtgaacctaaaatgctttcacccactttcaatgcatgccagagtgtcgttttataagccgattcatttagtgttacaccctgctgagttttgttctgttgcttaaaccagcctaattcaagccccgtctgattccatgtattccagatccaggccggtcttattacagtgcgaatactgtcaaaatcactatgagcaccactttcataactataaacatcttcgccgtgagaatagacaagcgcgttagccataataatattgtcagtaagatacatctcgccctgagagattaaacgccaggcgatcccattggtatgatcaccatagtaatagcgaccatgcgccatcgtattactggcatctgagaaactggcaaaactgctggcataggaattattggcaacctgtaacgtaaattcattaaacgtatcgcgttgcaggttttgccgtaaaacagaagtcagcatccagctatctttcatttcaaaataactgttgtcattttcgttatcttgttgttgatccgttttattaggtgcggaatatttagccattaatgataatgtcgcatcatcccataacgggatattgcgataacgaacatccacagaattggtattcatctggctggtacgcgaaaaatcacgagagtaaacatcgacatcatcacggcttaaggacatatcaaacagccctacaccaagtgcccagttttcaatccccacacccgcggcgacatccgtggttaaggttttccagtccagcatctggatctcatattgcgggagtttatgtttgccgacccagaagtctgcctctggtgcgaagggtaaaaaacctcgcgttgtcaggtaaatatcgctgaactgcatgatattttcattggcactgtcaccaaaccaggcatcgttatactgctcacccacgttgccatcataggtaacgaccgcatttgccgttttaccgtcctgattataaacacgctgatttaaggtcaggtcaaaccaaccgctcatctcattaccaaaacgtcccagagaacccgctgcataagtttgtggtgagccgtgattaccagtaccccagcctgagcggaagtacccctgatagctgaacccaatatcatcctttatatatttactgatatctttcagggtcacgctttcgatagtggttttgtcgcctttactttcaataacggcaacttgctgcgatccatttatagtatgcgctgcggtaaacgagttctgttcaccgttttcatttttgatgttatcagcgacgggagatgtcgctgatatttcagcaagcgaggctgatttatatttgttttccgtgatgcttttttgtaaggtcgaaagtcgggatttatatactcccagttcattctgtgttgctttcagctcttgtttattttgcgacaattcattttcaagcaattcaaggcgctgctctatggttaattttgttgccatcgcgttcaatggaaacaatgctgtaataatagaaaaagacaaaaggctgacgttaagcgtctttatattcatgacttatccttaagagtataataatttcctccagctatcgcactggaggaaaaaatcaggcatggagttcttttcttaatgaaataatttccctggctaaatcctggcataatattgcattcatcaaatgatcctgtgcatgaatcagaattaaattaacttttattttgccacagccttcatcctgactaattaatgcggtctgaatcttatgtgcctgaagacaggcagattcagaactggccattagctgagttgcgccctgccagtctttttgcccggcacaacgtatggcttccatcgcgtcagaacgtgcctgccccgcgttgaccagtaactccataacaagttcttcatctgcaaacatcacaatctccttcctgggtaaatggaattatccgttagttgtcatgttattgactttgttggcggcaataacaaaaggtaaatagatcattgtcgccacacctaaacataaaaaaccaaccagtaaagccagccagttccccccggttccgaggaaagcaattaaaggtccgggcgtagtccagggcacggcataagcaaccggtggaataatttccatcgaaacaaagaagtaaccaatggcacagttaacaatgggaaccataataaacggcaccatcatgatggggttaagtacaataggaaggccaaacattatcggttcattgatattgaaaataccggggataaatgacatttttgccagatcacggtattccgcacgcttagaagcgataaaaatagccaacaataaccccaacgtcatacctgaaccgccgcagttggcgaatgcatcattaatagaagtccaggtaatcggatatggcgcgccccaggtagtgccatgttgagcggcccaggagagattctccagattagcctcagaaaaaacggtttctcgaattgccgatgtggtattaggtccgtggatccccagcacccacaggaaattacccacagcccccaggataattaccgcaaagatattcgttcccatatgtttgagcggcgtctggattaatgtgtaaataagatcgtttagtcctgccggggatatcagtgtcaggcaataattaagtgcggaaaagaacaccatgacaaaaaatattggcaataaaactttaaatgaacgcgctaccgcaggcggtacagctgccggcatcgttatggtgatttttgggtttcgagctaagcgacaaaatatttcactggtgatcagtgcaacgataacagcaacaaacaacccctgcgcgccgagatatttggtcgtcaggaatgcttgcccatctatcatctgatatggcgtataaacaataaaaaatgctcctattgccgttaatccgcataaaagatcatcttgctcatagctaatcgccatattcctggcgaccaggaaagcaatcataattgacatgatatttacagaaccattcattaccggagtaaaaatagcttgtgctttttcaaggttggggaaaatgctattcagatgcagtaatccggcaataaaaccgtctggcgataatatggcaaagttaattaatataattaatgaacttgccatgataattggaaacgtaaaaacgaatccatctctcaccgctgcaacatgtttttgtgagtttaacttgatagcaactggaacaagaaaacgttccattccacgttcgaatgaggccattaatcccatttttttatacctgttgttttggatatttatacatcccaataaagcatgtatgccatatccattttatgatgtgtgaaaagttagttcaggtaatagtttaataatattagattcttactcttgcagtagtttcatcgcaaattcaagaactgcctgtccgttcatggtgccgtagtctttcatctcgataacggctacaggcattttcccctgtgcaacggcttcaatctctggtttctgaaagcgaacttgcgggccaagtaaaacaacgtcaacttcgttatttttaattttccctttagcttctgcaatcgccaatgcggaaatattaacttcaagtgaaatagcgttagcatgatcaatcatacgtttaaccagcatactggttgacatgcccgcagcgcgggctaacaatatttttttcatattttcccttactggtatataacagattacattgtttaaatatcatatcccgcagtagctatacgtcctggtacattgatcacagtaatacagtgataaagttgttcaacatcagggtgattattaaacgactcggccatacgataaaccaatcaggactcaactccttgttttcaatggctcttaaaaggtgcaaaagtgatttttcaaaagattgcccgcttacttaaatccgaaatcaatggcaattcatggcatgttggtgatttgttgccgtcagaagcggaactcgctgttcgttataatgtttcgcgtaataccctgcgtaaggcattatccttgctggaaggcgaaggaattattcacagaaagcatggttcaggaacatacattcaaaaaaagaattttgttgcacacattgatcacatgaacagtttcagtgaaattgcgcataaaagcggcaaagaggcagggagtcagattatgaaatttgaagtgcaggatgcttcacccactattgcgactgagctgaatttagtgactggtgagcaggtttattacataaagagactgcgattcattgaggataatgcagcacaattagaagaaacgtggatgtcagtagcacgttttcctgatttaaccgtgtcacatatgcaaaaatccaaattttcatatattgagaatgaatgcgggatcaaaatcattggcacctttgaaactttctcccctacttttcctaccccagaaatcgccagtattttacggatcagcccacgggatcccatacttaaaattcagacccaggctgtggacagtaactctattccgctggattattcgttactttacagcaatattttcgagttccaggtaaagtactttttcccgcgataaaagcagacgcacagagtgctgacatcacattctgtgcgtatggtttagcctctaacctttaccgctttacgccaccgcaagccaaatacattgatatacagcccggtcataatgagcaccgcacctaaaaattgcagacccgttaagcgttcatccaacaatagtgccgcacttgccagtccgactacgggcaccagtaacgataacggtgcaacccgccaggtttcatagcgtcccagtaacgtcccccagatcccataaccaacaattgtcgccacaaacgccagatacatcagcgacaaaatggtggtcatatcaatagtaaccagactgtgaatcatggatgcggaaccatcgagaatcagcgaggcaacaaagaagggaatgattgggattaaagcgctccagattaccagcgacatcaccgccggacgcgttgagtgcgacatgatctttttattgaagatgttgccacacgcccaactaaatgctgcagccagggtcaacataaagccgagcatcgccacatgctgaccgttcagactatcttcgattaacatcagtacgccaaaaatcgctaaggcgatccccgccaattgtttgccatgcagtcgctccccgaaagtaaacgcgccaagcacgatagtaaaaaacgcctgtgcctgtaacaccagcgaagccagtccagcaggcataccgaagttaatggcacaaaaaagaaaagcaaactgcgcaaaactaatggttaatccataccccagcagcaaattcagtggtactttcggtcgtgcgacaaaaaagatagccggaaaagcgaccagcataaagcgcaaaccggccagcatcagcggtggcatgttatgaagccccactttgatgaccacaaaatttagcccccatacgaccactaccagtagcgccaacaccccatcttttcgcgacattctaccgcctctgaatttcatcttttgtaagcaatcaacttagctgaatttacttttctttaacagttgattcgttagtcgccggttacgacggcattaatgcgcaaataagtcgctatacttcggatttttgccatgctatttctttacatctctaaaacaaaacataacgaaacgcactgccggacagacaaatgaacttatccctacgagcgcccttcttgcctcgtcgttgttattaaccatcggacgcggcgctacgctgccatttatgaccatttacttgagtcgccagtacagcctgagtgtcgatctaatcggttatgcgatgacaattgcgctcactattggcgtcgtttttagcctcggttttggtatcctggcggataagttcgacaagaaacgctatatgttactggcaattaccgccttcgccagcggttttattgccattcctttagtgaataacgtgacgctggtggtgctcttttttgccctcattaactgcgcctattctgtttttgctaccgtgctgaaagcctggtttgccgacaatctttcgtccaccagcaaaacgaaaatcttctcaatcaactacaccatgctcaacattggctggaccatcggtccgccgctcggcacgctgttggtgatgcagagcatcaatctgcccttttggctggcagctatctgttccgcgtttcccatgcttttcattcaaatttgggtaaagcgcagcgagaaaatcatcgccacggaaacaggcagtgtctggtcgccgaaagttttattacaagataaagcactgttgtggtttacctgctctggttttctggcttcttttgtaagcggcgcatttgcttcatgcatttcacaatatgtgatggtgattgctgatggggattttgccgaaaaggtggtcgcggttgttcttccggtgaatgctgccatggtggttacgttgcaatattccgtgggccgccgacttaacccggctaacatccgcgcgctgatgacagcaggcaccctatgtttcgtcatcggtctggtcggttttattttttccggcaacagcctgctattgtggggtatgtcagctgcggtatttactgtcggtgaaatcatttatgcgccgggcgagtatatgttgattgaccatattgcgccgccaggaatgaaagccagctatttttccgcccagtctttaggctggcttggtgccgcgattaacccattagtgagtggcgtagtgctaaccagcctgccgccttcctcgctgtttgtcatcttagcgttggtgatcattgctgcgtgggtgctgatgttaaaagggattcgtgcaagaccgtgggggcagcccgcgctttgttgatttaagtcgaacacaataaaaatttaattcagccttcgtttaggttacctctgctaatatctttctcattgagatgaaaattaaggtaagcgaggaaacacaccacaccataaacggaggcaaataatgctgggtaatatgaatgtttttatggccgtactgggaataattttattttctggttttctggccgcgtatttcagccacaaatgggatgactaatgaacggagataatccctcacctaaccggccccttgttacagttgtgtacaaggggcctgatttttatgacggcgaaaaaaaaccgccagtaaaccggcggtgaatgcttgcatggatagatttgtgttttgcttttacgctaacaggcattttcctgcactgataacggatcgttgacacagtagcatcagttttctcaatgaatgttaaacggagcttaaactcggttaatcacattttgttcgtcaataaacatgcagcgatttcttccggtttgcttaccctcatacattgcccggtctgctcttccaatgaccacatccagaggctcttcaggaaatgcgcgactcacacctgctgtcacggtaatgttgatatgcccttcagaatgtgtgatggcatggttatcgactaactggcaaattctgacacctgcacgacatgcttcttcatcattagccgctttgacaataatgataaattcttcgcccccgtagcgataaaccgtttcgtaatcacgcgtccaactggctaagtaagttgccagggtgcgtaatactacatcgccgattaaatgcccgtaggtatcattaaccaatttaaatcggtcaatatccaacaacattaaataaagattcagaggctcagtgttgcgtaactgatgatcaaaggattcatcaagaacccgacgccccggcaatcccgtcaaaacatccatattgctacggatcgtcagcaaataaattttgtaatcggttaatgccgcagtaaaagaaagcaccccctcctgaaaggcgtcgaaatgcgcgtcctgccagtgattttcaacaatagccagcattaattcccgaccacagttatgcatatgttgatgggcagaatccattagccgaacgtaaggtaattcatcgttatcgagtggccccagatgatcaatccaccgaccaaactggcacagtccataagaatggttatccgttatttctggcttactggcatctctcgcgaccacgctgtgaaacatactcaccagccactggtagtgggcatcgatagccttattgagatttaacaagatggcatcaatttccgttgtcttcttgatcattgccactcctttttcacagttccttgtgcgcgctattctaacgagagaaaagcaaaattacgtcaatattttcatagaaatccgaagttatgagtcatctctgagataacattgtgatttaaaacaaaatcagcggataaaaaagtgtttaattctgtaaatcacctctgcattatcgtaaataaaaggatgacaaatagcataacccaataccctaatggcccagtagttcaggccatcaggctaatttatttttatttctgcaaatgagtgacccgaacgacggccggcgcacttttcttatccagactgccgctaatgttgatcatctggtccggctgaacttctcgtccatcaaagacggccgcaggaataacgacattaatttcaccgctcttatcgcgaaaaacgtaacggtcctctcctttgtgagaaatcaaattaccgcgtagtgaaaccgaagcgccatcgtgcatgttttttgcgaaatcaacggtcattttttttgcatcatcggttccgcgatagccatcttctattgcatgaggcggcggtggcgctgcatcctgttttaaaccgccctggtcatctgccaacgcataaggcatgacaagaaaacttgctaatacaatggcctgaaatttcatactaactccttaattgcgtttggtttgacttattaagtctggttgctatttttataattgccaaataagaatactgccaattgttataaggcatttaaaatcagcccactagctgtcaaatattcagagaatttaactcactaaagttaagaagattgaagagtcttaaacatattttcagaataatcggatttatat

SEQ ID NO: 297 - DNA, 12529 bp, Escherichia coli
  source 1..12529: mol_type = genomic DNA
ccattcttcagatgataaagacgtcatcgcaattgatggaaaaacgctccggcactcttatgacaagagtcgccgcaggggagcgattcatgtcattagtgtgttctcaacaatgcacagtctggtcatcggacagatcaagacggatgataaatctaatgagattacagctatcccagaacttcttaacatgctggatattaaacgaaaaatcatcacaactgatgcgatgggttgccagaaagatatagcagagaagatacaaaaacagggaggtgattatttattcgcggtgaaaggaaaccaggggtggctaaataaagcctttgaggaaaaatttccgctgaaagaattaaataatccagagcatgacagttacgcaatttgtgaaaagagtcacggcagagaagaaatccgtattcatattgtttgcgatgtccctgatgaacttattgatttcacgtttgaatggaaaggactgaaaattcacaatgtgtgttaattttactgacatctttcaaaaggagcacaatcatgccgcacatcgacattaaatgttttccgcgtgaactggacgaacaacaaaaagcagcacttgctgcagatattaccgacgttattattcgccatctgaacagtaaagacagttcgataagcattgctctacagcagattcaaccagaatcttggcaagctatctgggatgccgaaatcgcgccccaaatggaggctttgataaagaaacctggttacagcatgtaatgcttaacccgccgtaactcgcttgccgctggtaacaaacgtgccagcacctaaatgatgcaacgtattgagcttatcatcatcaaactgccagcggccttcgacaaatacccgtgcgtctgccgctgctgataccacctcgccaaacagcgtgtcgtatttttgttgcgcagaagtcgcaggtagcaggcggcactccatccacgccaggcatttctcttcaacaagtggcaaaccaagcaccggacctttcaccaccggaatgccatagcaattaaatttatcttcttcacgacccgacacgcttcccactgcccacgtccagttagttgctgcaacgcccgggataacgatgccaaatttaccgttacgttcaatcaactccctggtccatgtcgatttatctaccacaatcgccacgcgtggcggttcaaactccaccggcattgaccaggctgctgccataatgttacgccgctgggattgctcatcgaaactggtgatcatgacagttgggccatgatttaacagacggctggcatggtgtaattctatggggatgaatcggctcatggtatcgcctcgcgaagaaggtttttttaagcgtagtccgtaacgcaataagtaacgaaattaacgggattggcgatttgcaaacgtgatgcatgtccgcgatcgcacaaaatagccggtgcggcgtctattccaggttataagttgagaaaaccactaagggaaacgcctgatgacgcccattctgaatcactattttgcccgtattaactggtcgggagctgctgcggtcaatattgatacgcttcgtgcattgcacctgaaacacaattgcactattccgtttgaaaacctcgacgttttgctgccgagggaaatacagcttgatgatcaatcgctggaagagaaactggtgatagcccgtcgtggcggttactgttttgagcagaatggcgtgtttgagcgggtgttacgcgagctggagtttaacgttcgcagcttgttagggcgcgtagtgttatcaaatccgccagcattaccgccgcgcacccatcgtttgctgttggtggaactggaagaggaaaaatggattgctgatgtcggtttcggtgggcagacgctaaccgcgccgattcgtttagtttccgatctcgtgcagaccacgccacacggagattatcggttgttgcaggagggtgatgattgggtgttgcagtttaatcatcatcagcactggcagtcgatgtaccgttttgatctctgcgagcagcaacaaagcgattatgtgatgggcaatttctggtcggcgcactggccgcagtcgcattttcgccatcatttgctgatgtgccgccatttgccggacggcggcaagctgacactgaccaattttcattttacccattatgaaaatgggcacgcggtggagcagcgaaatctaccggatgtggcgtcattatatgctgtgatgcaagaacagtttggtctgggcgtggatgatgcgaaacatggctttaccgtggatgagttagcgctggtgatggcggcttttgatacgcacccggaggcgggaaaataatttatgtcaggttgccggatgcggcgtaaacgccttatccggcatacattagctcggttgtagacctgataagcgaagcgcatcaggcaacggtttcagagtttaattgcccattcggcatgaaacaaaatcaccgccgcgccagaaatggtgactttttccggttggttatcacgaattgtcaccgtcacttcaatcacgccgtcacgccccaatgcgcgcccctgatggcctttaacacgcagcaccttgccatcgtggggcaatacgttgtgatgtaccaaccatgcacccatcgggccattggcattgccagtcaccggatcttccacaataccaatcgcaggcgagaacatgcgaccatcggtttcgtttttgcctaggcggatctggaacgggaagaaaccattgcagccaatctgtttactgatagcggtcagcgcattaaggtcaggnnnnnnnnnngatatccacttccggcttcaatgggatcatcactttagaatgcccggtcgtcgcgacctggatcggcaaacccggcagaatatcgtcttcagtaagatgcaatgcgttgataatcgccgcgcgtacttcatccagcggcagttcaaagcccggcgtaccttgttccagcgaaatacgataatcatcgttgtgcttttcgatagtcacgcgatgttttcctgccagcgatgtttgccagatcgtgcaatttcctaaacctaacaccttcgcacgtacatagtgcgcagctactgtcgcgtgaccgcaaatcggcacttcaaccgttggcgtaaagtagcggatgcgcacatcgctgtcgtcgctgtgcagcagaaaagcagtttccgaatggcctaactcgcgggcgataagctgcatttgcgcttcgctaagattatcggcggggaaaacaacaccggcagaattgccgcgaaacggttgtgaggtaaaagcatcgacgtggtacacctgcggtttcattaacgttctcctgtgactggagaactatcatagcctgcaagtggccggagagcgaagggctatccggccagggtgaaattatcgccgcgaacgcacaatttgatatcgacgagtaaagtactcaaacggcgcgctccacacatgcaccagtcgggtgaacgggaagagcaggaagatggtcattcccaacaccagatgcaggcggaagacgaacgctacgccgttgagcatctctgacgatccaccacggaaagtgacaatgctttgcgcccaacccaccagcttcatcatttcgctaccatcaggatactgtgctgaaaacggtatggtacttagccccaacagacactggatcagcaaaatgctcatgatgatgatatccggcgtagtggaagtggcacgcacgcgctgatttgtcagcctgcgccacagcagtcctgcgccgccaatcaacgtcaacacaccgcaaataccgccgagcaccatcgccatgagttgtttcgctgccactggtaaaaaccacgcgtacatccagtgcggcgttaacatgccgaacaagtgcccgaagaaaatccccaaaatgccgatatggaacagattcgaccatatcaccatcccgcgtttatcgagcatttgacttgaggaggcgcgccaggtgtactgcccgtagtcgtagcgcagccagctgccgaggaaaaacaccgtcgcacaaatgtacgggtagatatcgtaaaaaaagacgttcagatactgaatcatttcccacctcccgcactgatgtcgacatattgcggcgcgacatcctggctaaagcgtcgctgatattgattaagcggcgagctgtcacacgccgtggcgttatcttcaataaacttcacctgttcctcttcccacactgcatcaagcgcctggcgggtgtcatcgcgctcttcgctgtttacttgttttgtgacactgtcacttgaaagggagcttcccgccagttgcagcagagcatcaaacaacgcgtaccacggtgcctcgcgttgttttaagcgaccgccaagcagggcgaggatcggcgcaacattgagcaatccttctttcgcctgatcgtcaggcagtacgcttaaatactccagatacagcggtagataatcgggcagttcccgacaatccagctgcaggccgaccttttcatactccgccagcaggtccaccattgcctggccgcgatcgcgggactcggcatgaacatgttcgaacagcagcagcgacgtggtgcgcccgcggtcaaacacttcgcaccattcggcctgtttatccagcagcggcgcgttaagcaggttgtgggtgaaatccgtaagcatcggcgcgtcgcggcggatcaacgccagcgcgtcctccttgcattcccacaacagctcatccggatactccatcaacaggccgatcactttgaggatctgcattattcgccctccgctttgtcgcgcacttcggtgatgttgatggcatcgatacggctactgttgaacaggttgaatttgctgtccgagccgtgacaaccgtcgccaaaggtaaaaccgcagccgttgcgttctgcgaaggcatcgcccgccatttcccgatggctggtcgggataacaaaacgatcttcatagttggcaatggcgagatagcgatacatttcttcgacctgggcgacgctcaggcctacttcgtcgatggcacgagtatcagtaacgccttccacggtttgtgaacgcatatagtggcgcatcgccatcatccgtttcagcgcccgcagtaccggaccggtatcgccggcactcaacatattggcgagatattgcaccggaatacgcaggctttcgatggcgggcagcacgccttcgcttttcggcaaaccgcccgcatctgcgtaggactgaatcggcgacagcggaggaacgtaccagaccattggcagggtgcgatattcagggtgcagcggtagcgccagtttccagtccatcgccattttgtagacaggcgaacgctgggcagcttcaatcacgttttgtggaataccttgtttcagggcttcctcgatcactgagggatcgtgtggatcgaggaacacttcgcactgacgttcatagaggtccacgtcgagcatgatgatcgcagcttcctcaatgcggtcagcgnnnnnnnnnngatttttttgtgcggacaaccgctaatagacaaatgacagccacggtatttatcctgatcaatctgcacaatgccggcttcttcgcgtttgtagatagcgccgcttgggcaggtcgccacgcaactgggattgaggcagtgttcgcacaggcgcggcaggtacatcatgaaggtgttttcaaactgcccgtacatctccttttgcatggcctcgaagttgcggtcgcgggcacgtttttcaaactcgccgcccagcagttcttcccagtttgggccccagatcactttgtccatccgtttgccgtcaatcagtgaacgcgggcgagcagtagggatatgtttgccttccggtgcgctatgcaaatgttcgtagtcgaaggtgaaaggttcgtagtaatcatcaatctgcggcaccaccgggttggcgaagattttggttattacgcccatcttgctgcccagacgcggacggatcttgccattcacatcgcggacccagccgccttgccactcttcctgatcttcccaatttttaggataaccaatgcccggtttggtttcgacgttgttaaaccatgcgtactccatgccttcgcgtccggtccagacgtttttacaggtcaccgaacaggtatggcagccgatacatttatcgaggttaagcaccatgccgacttgcgaacgtattttcattttttcgcctcctgtacctgatcgcgaccttcatcatccagccagttaacgtttttcattttgcggatcatgatgaattcgtcgcggttcgagccgacggtgccgtagtagttaaagccccaggccagctgcgcgtaaccgccaatcatatgcgtcggtttcgggcaaacgcgggtgaccgagttatgaatgccgccgcgcatgccagttacttccgaaccaggaatattcataatgcgttcctgggcgtgatacatcatggtcatgcccggcggtacacgttggctgaccaccgcgcgggcagtcagcgcgccgttggcgttgaatacttccacccagtcgttatcgacaatggtcagttctcgggcatctgtttcgctgatccagacaatcggtccaccgcgagagagcgtcagcattagcaggttttcactgtaggttgagtgaatgccccatttctggtgcggcgtcaggaagttaagtgctttttccgggaagccgtttggcggtatctggcgcatctcactgacgctacgggtgtcgataggcgggcgataagccaccaggctttcaccaaaagcacgcatccacggatgatcctgatagagctgctggcgtcccgacagcgtgcgccacggaattaactcatgaacgttggtgtatcccgcgttataggatacgtgatcgctttccagaccggaccaggtggggctggagataattttacgcggctgcgcctgaatgtcgcgagagcggatcgtgtcgtcctctttgtgcagcgccggatgggtatgttcgcgcccggtgatctcgcccagcgcctgccacgctttgactgcaacatgaccgttggtttccggtgccagtgccagaatcacttctgaagcgtcaatggcggtgtcaatcagcggacgcccctgtgccgggccatcacgcttggtgtaattgagtttgccgaggaaatcgatttcatcctgcgtattccacgaaatccctttaccgccattgccaagtttgtccatcaatggcccgagcgaggtaaagcgttcatacgtagcagggtagtcgcgctccaccgccacaatattcggcgcggttttgcctggaatcagatcgcattcgcctttgcgccagtcgagcacttcacacggctgtgagagctctgccggagagtcatgcagtaggggttgtaataccacgtcggtttctttgccaagatgacccacgcacacttgcgaaaatgctttggcgatacctttgtagatttcccagtcgctgcgtgattcccacgccggatcgaccgccgcagaaagcggatgaataaacggatgcatatccgaggtgttcatatcgtctttttcgtaccaggtggcggtgggcagaacgatatcggagaacaggcaggtactggacatgcggaagtcgagcgtcaccagcaggtcgagcttgccttcaatcgctgcagtttgccactcgacttcttccggtttgatcccgtcgctggcaccgagttcctcgccctgaatcccgctttcggtccccagcagatacttctgcatatactcgtggcctttgccggaggagccaagcaggttagagcgccagacaaacaaattacgcggatgattgctgctgctatctggttgttcgcaggccatacgtaaatcgcccgatttcagcgcctgggcggtaaattctgtgggggataatccggccttgtcggcttcagctttaatcccgagcgggttacgccccagctgcggcgcagaaggtagccagcccatacgttcggcgcgaacgttgaaatcaatcagatgaccgctgtacttactggcatcggcgagcggtgaaagtaactcctgagcagagactttttcatagcgccattggctggaatgattgtagaaaaacgaggtgctgttcatttggcgcggtggtcggttccagtcgagcgcaaaggccagtggcaaccagccggtttgtgggcgcagtttttcctggccgacatagtgtgcccagccgccaccgctttgcccgacacaaccgcagaagatcagcatattgatcatcccgcggtagttcatgtccatgtgataccagtggttaacacctgcgccgaggataatcatcgagcgcccatgcgttttatgggcggtatcggcaaattcacgggcgatggtttcaatatactggcgcggcacgccggtaatttgctcaccccaggctggggtgtacggtttgatttcagcgtaatctttcgcactgttttcatcttccagcccgcgatcgaggccgtaattcgccagtaccaaatcataaacgctgaccaccggacaggtgttgccatcgactaacgtcaggtttttaacgggcaattggcgcaccagcaccggattgtgttttacgctgcgaaaatgcggattttcaatgccgccaaagtaggggaaggccacgcctgcaacagcgtcatgttgaccgagcagggttaacgacaattcggtttccgtaccggcggcaatggattccagattccatttgcctttttctccccagcggaaaccaatcgaaccgttcggcactaccaattcacctgcggtattaactgctacggttttccactgcggattgttgctttcgcccagtccatccaccaggtcagatgcgcggatcatgcgcccgggaacgtagctaccatcgtcgcgaggctccagcattaccagcatcggcatgtcgctgtagcggcggcagtagttgataaagtagtcgctgggattatcgagatgaaactcttttaaaatcacatggcccattgccatcgccagggcgctatcagtgccttgtttcggtgccagccactggtcgcacaatttggccacttcagagtagtcaggggtaatggcgatggttttagtgcctttgtagcgtacttcggtaaagaagtgggcgtccggcgtacgtgtctgcggtacgttagacccccaggcgatgatgtagctggagttataccagtcggcagattccggtacgtcggtttgctcgccccaggtcatcggcgaggcgggcggcaggtcgcaataccagtcgtagaaacttaaacaggtgccgccaagcagcgacagataacgcgttccggcggcgtaagaaaccatcgacatcgccgggatcggcgagaaaccggcaacgcgatccgggccgtaggttttgatggtccagacgttagcggcggcaatcagctggtttagttcctgccagttggagcggataaacccgccgcgcccacgcacttgtttgtagctcaggcacttttgcggatcgttcataatcgatgcccacgccagtaccggatcgctgtgttgcttgagggcttcgcgccacagttcaatcagtcgtttacgaatgagcgggtatttcaggcggttagcgctgtaaagataccaggagtaacttgcgccacgcgggcagccgcgaggttcatgattgggcaggtcagggcgagtgcgcgggtagtcggtctgttggatttcccaggtcaccagaccatttttaacgtagattttccagctacaggagcctgtacagttaacaccgtgggtggaacgcacgattttgtcgaactgccaacgctggcgatagctgtcctcccagtcgcggttgctatgcatcacctgtccgtgaccatcggcaaaggtttcgcccttttgtttgaagtagcgaaagcgatccaaaagtttactcatgacatgactcctgctccaggaatgaattgggatctgatgccttgtcggatgcgacacggttgtacatcaggcatcgatctcttatttttggctgaacttccgccgaccataaaccagccaggtcagcagcacacaaacgatgtagaagattaaaaacactttcatcgcgccgaccggagagccggtcatattgagcgacatgccaaacgcctgcggaataaaaaagccgcccactgcgccaatggctgagataaagcccagagccgccgccgtttcggtgacggcttctttctgagcttgctcatcactaccgcctttcacctttacccgataaatggttatctggcgaaagatgacggcgatcatctggaaagtagaaccacttcccagacccgcagtcagaaacagccccataaatacggcgtaaaaggcgatgaaattaccggagcctgtgcccggtaaggtaaggaacagcagggcactgaaaatcgccataaaaataaagttgatcaacgtcacccgcacgccgccgaacttatcggaaatagcaccaccaaccgaccgcgcgatggcaccgataaatgggccaaagaacgccaggcgcagaatattcacatccgggaactgggtttttgccagcatggcaaaacccgcagaaaaaccgataaacgaaccgaaggtggcaaggtaaagcaggctcagcagccagagatgcaggcgttgtaagacagggagctggtcggcaattgaggcgcgtgaactggcgatatcattcatccctgaccaggcagcgatcgtggcaatcgccagtagcggtacccaaatccatgcggcattcgccagcgacatcaccgaaccgtcggcctgcggtacgccattgacgccgagaaaggcaaatacaggtacaaaaatgaccagcggtgcaaccagctgcattacacttacacctaagtttcctaatccgccattaatcccaagagcgctcccttgtttggcttttggaaagaagaaactgatattgcccatgctcgaagcaaagtttgcacctgcaaaaccgcatagcaaagcgataacgataaatatcccaaaaggagtattcggattttgcacggcaattccgagccagacgcaaggaataatcaggattgcagtactaaaaaccgtccatnnnnnnnnnnatataggcaccataaaggagtagggaacacgcaataatgcgccagaaacggagggtaatgcggttaataaaaagagttgatcggtagtaaaattaaaaccgattttattgagattaacggtaactgcgctaaatagcatccagacacagaaggcaagaagtagacaactgactgatatccagaggtttcttcgagcaatatgttttcctttattttcccagaaggcaggattttctggtttccagtcgcgtaaaagataacgactatttttctcattttgcagtgccatattgttcctcacatgcacacattggtaatgaaaaaagacaaaacaggaggtaaggcgcaatagccagttattagaattaaggatgaattgggtgaagtgctgattgaaagaatagataagaaagcgtaaccgcgggggcagaatggggattaagtagccagatatgtgttactaaatgtaactaacaagctaaccttcaaacgggggttaatctttgaacgtatgtcatgtttcaacccttcagatcgtgaatctaaagggttacatattaactatattatcaacaagaccagacacttatagaattagtgatgatttattcactaaaaaggccatgaactggaggaaaacgatctgtccagaaggtctatcggttcctctcttattgcctgattgtaataatcgttattacagtaagtattgtttatttcatctaaggtcatgtttttaacttttatattcctctggtttacaacttcctctgtcttgtaagtgtgtatattatatggggtatatgctttattaataggatagtgaaacaattcgttatccacatctattccgtcagagtgaacttcaaatgcaccaggcgaaagaattgccaggccagtattaagcttaagtgctggggaaaacgaattaaataacatgagctgcatagtagggcaattgttcttcccagaaacatttaaaaaatttaagttttgctctgttttattatggggaataaagttccaatatcggatgtattattagtatcaatgtgggttattttattattgtccagtcttaaacttttgatagatggaagataagtcaggaaatcaagatttatatatttcaactggttgttagcagcgtttaatgtctgaacattgcagaagttgctatagaatattttaatttcagaaagcaaattgttgttaataagtaacgtattcaagttgggaaataagtcattgtgtaaacttgttagtttattatgggatagatccagcagtaagagttcatttttattacctgcaacaatatcagttaattgattatggctgagattcaggtattgcagccattcgcaagattctaattgcacaaactctagttgattatgtgc

SEQ ID NO: 298 - DNA, 12467 bp, Escherichia coli
  source 1..12467: mol_type = genomic DNA
tctgtgcttgagttgttataccgcgagtgctggcactgatgataacgtaggatatattgttgggaatagttacggcgttggtccgtcagatcaaaaatggagagaaacggggccgaatggcgatgctactgtcatattcagatatgcaacaagtacaaataatttagttttctacaaaccgacgcagcttggacctacaggtgtaaaattacagtggagtcagttagataccgcttctggtggtggttttctttattgcaacagaagtgatagcacaagtggtagcgcaatgcgtattgaaaatgcaatggttgactcaggtaaaatgtatggctcccataaattatttaatacatcagttcctggtttgtattacacattattaatttcaaacatgtggtcagcttacggtaccgtaactaacgttagttcacctgggatatacattggtgactctgcagaacaatatttttcgtggtataatccaagcgaagacgtgttatattggagttgcaataatgcgaatagcacccgtaaatactgggctgtaggtggtatttatcagacccttacaattgaattctatacagatacaaactttgatccaacagtaactcaacagatcaaattatccagctcatcaaattatctgtattcatttaaagcctatggcgcaggccaaggtataaatgagcatagttattttatcaaaatcgatttcgatctgctcaatgtcaagttgactaatcccacttgttttaccgctatgcttagtggaacttctgtgactggttctacggtaaaaatgggtgaatatagtgcagaacaaatcagaaacggtgccacaccggttccttttgatatttcacttcaaaactgcgttcgtgtgactaatattgagacaaaattagtttcaacaaaggttggtactgaaaacgggcaactccttggtaatactctcacaggtaatgacgcagcaaaaggagtcggtgtactcatagaaggtttagcaactagtaaaaatcctctaatgacattgaaacctaatgattcaaattctgtttataaagattacgacccgagaggcaaagacgatacaacaggaggagtttacccggatcaagatacaggtataacataccctctccatttccaggccacgctacaacaggatggaactataccaatagaagctggtgagtttaaagccaccagtactttccaggtaacctacccttaataagtccaccgcaccgccatcatctggcggtgcagtaattgataaatcattgcccccaccaatgtgactgataaaatgccaggcaacacgacatcatttatcaggatacgttatgaaaccaaccaccattgcttcacttcagaaatgtaagcaggataaaaagcgtttcgcgaccatcaccgcttacgactacagcttcgcgaaactatttgctgatgaaggacttaacgtcatgctggtaggcgactcgctgggcatgacggttcagggtcacgactccaccctgccggtgaccgttgctgatatcgcctaccacactgccgccgtacgtcgcggcgcgccaaactgcctgctgctggctgatctgccgtttatggcgtatgccacgccggaacaagcctttgaaaacgccgcaacggttatgcgtgccggtgccaatatggtcaaaattgagggcggtgagtggctggtcgaaaccgtaaaaatgctgaccgaacgtgccgttcctgtatgtggtcacttaggtttaaccccacagtcagtgaatattttcggtggctacaaagttcaggggcgcggcgatgaagcgggcgatcaactgctcagcgatgcattagccttagaagccgctggggcacagctgctggtgctggaatgcgtgccggttgaactggcaaaacgtattaccgatgcactggcgatcccggttattggcattggcgcaggcaacgtcactgacgggcagatcctcgtgatgcacgacgccttcggcattaccggcggtcacattcctaaattcgctaaaaatttcctcgccgaaacgggcgacatccgcgcggctgtgcggcagtatatggctgaagtggagtccggcgtttatccgggcgaagaacacagtttccattaaggagtcacgttgtgttaattatcgaaaccctgccgctgctgcgtcagcaaattcgccgcctgcgtatggaaggcaagcgcgtggcgctggtgcctactatgggtaatctgcacgatggccatatgaagctggtcgacgaagccaaagcccgcgccgatgtggtcgtcgtcagtattttcgttaacccaatgcagtttgaccgcccggaagatctggctcgttatccacggaccttgcaagaggactgcgaaaagctaaacaaacgtaaagtggatttagttttcgccccttcggtaaaagagatctacccgaacggtactgaaacccacacttacgttgacgttcctggcctttcgaccatgctggaaggtgccagccgtccgggacattttcgcggcgtttcgactattgtcagcaagctgttcaacctggtccagccggacatcgcctgcttcggtgaaaaggactttcagcaactggcgctaatccgcaaaatggttgccgatatgggcttcgatattgaaattgtcggcgtcccgattatgcgcgccaaagatggccttgcgctcagttcccgtaatggttatctgacggcggaacaacgcaaaattgcgcccggtctgtacaaagttttaagttcaattgccgacaaattgcaggctggggaacgggatctcgatgaaattattaccattgcggggcaagaactgaatgaaaaaggcttccgcgccgatgatattcagattcgcgatgccgacacattgctggaagtttctgaaaccagcaaacgggcagtaattctggtagccgcctggcttggcgatgctcgcctgatcgacaacaaaatggtcgagctggcgtaatacttaactggcgctacggnnnnnnnnnnttattaatttaccccacgtcatctgtcataacacaggtaacttaaataaggttaattaccttatcaatctcagcaagaggtaaatttgccatctctgcaacgtcttcccgagacattcctttacttagaagacgcagggcgaattcttgcctttcctcctgtcttccctgctgaatccccttctcaatccctttctcttcaaaccactgcgccagcgtcatcatagactcccctcccgtttccctgtctctcagcacaccataaaacaaatccgcttgttcagtatgaccgcgttgcagcatatagttttgcatggcaactaactgacttccgctagtgtacccttcgtcaatcagcgtgaccagttgctccagcaataacattaagtcgcgctggcgaatatgtttttgcagtagttcgagaatcgcaatccgccgatgttgcatgatttcgtcatccggtgtgatggtgatatccaccagcgggaaaggactgttatagacgcgtcgtgccagctccggcgagtaaaatatatcaaaccagcacattgagagcggataaggtgtggcctcgccctgataaaacagtatcggcaccaccagcggcagcttatcgtgatccgcctccagatgccggtgcatggcagcaatagaataacgcatcatgcgaaaggccattttcttatccggcttgctttggtgttcaatcacaacatgcagataaccgggattgccctgcatttgcacggaatagagcacgtccgtgctgtgtcctttcaggctctcttcaatgaaactccccgactctaaatgaagcgtgttgaggtcacaaagttcgcgtaattccactggcaaatgtatctccagaaagtcgcgagccgtctccgcatgcattaaaaattgtttaaataccgcgtcatgcggtgtggtactcggtgcatccatcttccctgtcttccgtgttgtcttgcgtgaaggcagtatccagtcaaggcgcgccgtcgtcagccgcctctttagtgtttaccgagcagcgttcagagaaatttcaattcgttacaggcgatacatggcacgcttcggcgcggtacgcaaactgctgacgcaaatgccatcagatgagtagacactcatcaaaaatcgggcaatactgcgtgagaatttcctcaaagcaggcaccgcctgcttcgttaacgacagggtagaaaggtagaagttatgattcgcacgatgctgcagggcaaactccaccgcgtgaaagtgactcatgcggacctgcactatgaaggttcttgcgccattgaccaggattttcttgacgcagccggtattctcgaaaacgaagccatcgatatctggaatgtcaccaacggcaagcgtttctccacttatgccatcgcggcagaacgcggttcgagaattatttctgttaacggtgcggcggcccactgcgccagcgtcggcgatattgtcatcatcgccagcttcgttaccatgccagatgaagaagctcgcacctggcgacccaatgtcgcctattttgaaggcgacaatgaaatgaaacgtaccgcgaaagcgattccggtacaggttgcttgattgttatccctgcggctggttactcaccagccgcgacatcgtctccagcgaatccgttcttaagatataaagtcgttttagtaacaacggattatcccccggttttactttgcctttcatggttgtcaccgccaggtgaaatccggcatcgtttgctgccttcacggctttgtcattaaatccgccaaacggatacgaaagataccagacatgcggattaaattgcgccagagcgcggcgtgaacgtgcaaaatcaaacagaatattgtgctcactacggctcagtaatatgggtcggcgatagccatccacccgatgcaaaaaatgggtatgtgactgaaaatcaaaaacatcgcgaatttcgttaagctcagaaacgctcataaattgcagcgattttgggttccacttctgcgggtgacgtttgatgcgcgaggtaacaacaaacgccgtcgccttcatgccatattgtttcaatacaggatacgcatagcggctcaccgacttgaggccatcatcaaaggtaatcaccaccgctcgcgcagggagattgatcttattcttcacgtaaccttccagctgcgccatgctcagtgtcgcgtatcccctgtcgcgcagccaggccatctggttattgaaagcgcgtaccgaggtggtcgtcgaagtatggcgaaaacgggtgttttcttcatcgcgcagaatatggtgataggttagcaccggcaggccattatcgggttgggcatccagcgcgctgatataggcgagtcgatcgccaatacggatctgataccaggtttgatttaacctgtctttcagtttatgcaaaatcgggtagcgcaaattgtccgccagtaccccaaatggcgcactgcccgcactcggcgcgttatagaccggcgtatctttccaggtaattaagttctgattactcagcggcttgttgaggtcacccaaaccgtcttcaactttttgtcgcccctgaactggctcgagatgccctttatcgataaaccctttaccaaagccaaaattaaatgcgtaataacttgcggcagtgggctccacggcaatgatttgcccggcccgaatattccccacggtcaccatcttgtcgccaatttgcgcccagatcgcagcattttcgatggtttgcatataacgggcaggtaacgcggcactgacacttgcggtaaacagcatcagcaggagaataacagcttgtttatacatgaaaaaataaccgagggtgaaacaacgcttttattgtagcaaaagcgccaccagaatcgcgggttaatactcatacaaattatgtttgaggacgaaaggcggatttttttgttgttggtgccaaagactactcacctccggcgcacccagttcgacaatacgctcgcgaaactctgaactggtcatggtttcacggcaagccatcatctgttcaattaacggtaacgtgacaccagaaatcacttcgcaacgggagtgtttgtggcttaataatgaagccacgcggtacggtggcgctccggctatatcggttaagaagatgacaccctcaccagagtccgcttcatgcagagcatcgcacatcatgcggctgagcatattagagcttaacccacgccagaaattcacggcccggcactgaagaagcgccccatgttttttctccagcgcatccagtatctcttgcgcccggtcatcgtgacaggtaattacccaacctaacatcgccttcctccttagccgaaaatcagtctaccctgaccattgttgataaagggtgatagccgtcaaaactcctctcccccaaatccagaggagaggaaatagccttagctacgcaaaccacgtccacgttggatcagcgaccaacagatcaaataaaacgccacaataaagaccaccagtacgccaaaggtagtgaccagcggaacatcattgataccgaggaagccgtagcggaaaccactgatcatataaacgattgggttcaggtgcgacagcccttgccagaacggcggcaacaaagtcagtgagtaaaagaccccacccaaatacgtgagtggcgttaacacaaaggttggcaccaggctgatgtcatcgaacgttttggcaaacacaccgttcagcaaacccgcaagggagaacaacaccgccgtgagcaccagggttaaggcaacgaatacccacgaatgcacctgaaacggcacaaaaaacagtgaaattgccgtcaccagaatgccaacaaacagaccacgcgccacgccaccgccgacatatccggcaataatgacgtgagtcggaaccggcgctaccagcagctcttcaatattacgctggaacttggcaccaaaaaatgatgacgcaacgttggcgtaggcattggtgatcaccgacatcatgatcagccccggtacgatgaactgcatatagctgaagccatgcatatcgccaatacgcgaaccaatcaggttaccgaagataataaagtaaagggtcatggtgatgactggcggcaccagcgtctgcacccagatacgcataaagcgatggatctctttcgcccagatgctttttagcgccacccagtaaagatgcatcatgcgcgatctccttgtttttcattaaccagtgaaacaaacagctcttccagacggttagctttgttacgcatacttaatacctgaatgccctgctcacttaactgcgtaaatacgctgttgatcccctgctcacgcagcacttcaacttccagcgtcgcggtatcgaccagtcgatactgatagccatcgagcttcggtaacggacttttcggtgcgagatcgagaataaaggtttccgatttcagcttcgccagcagcgccttcatcgaggtattttccaccagctcaccgtgttgaataatgccgatattgcggcacagcatttctgcttcttccaggtagtgtgtggtgagaatgatggtggtgcctttgtcgtttaaatccttcaaaaagccccacattgagcggcgaagttcaatatccacgcctgcggtcggttcgtcgagaatcagtagtttaggttcatgcattaacgcacgggcaatcattaaacggcgcttcatcccgccagataacatacgcgcacgttcgttgcgttttccccatagatcgagttgtttaagatatttttcgctgcggatgtacgcctctttgcgctccacaccgtagtaccctgcctgattcaccacaatttgctgcacggtttcaaacgggttgaagttaaattcctgcggcaccagtcccaactgacgtttagcgttcacgacatctttctcgagatcgtaaccaaatacgctgacccgcccggaggttttatttaccagagagctgataataccgatagtggtcgatttcccggccccgttcggcccgagaagcgcataaaaatcacccgcttcgacctgcaaatctattccacgaagcgcctgaacgccgcctggataggtttttttaagctgttgaagttccagtgcaatggtcataaatttttacttaccttacgttcttacactttatctgtggtttaaatcgtcccggagttgccctatattagccaaacgtaattatttggttacaggtcgttaacctccatgaaagacatagatacactcatcagcaacaatgcactatggtcaaaaatgctggtggaagaggatcccgggttttttgagaaactggcacaagcgcaaaaaccgcgctttctatggattggatgttccgacagtcgcgttcctgcagaacgtttaaccggtcttgagccgggcgaactctttgttcaccgtaatgttgctaacctggtcattcacaccgacctgaactgcctttccgtggttcagtatgcagtggatgtactagaagttgaacacattattatctgtggccactacggttgcggcggcgtacaagccgcagttgaaaacccggaactggggcttatcaacaactggctgctgcatatccgcgatatctggttcaaacatagctcattgctcggcgaaatgccgcaagagcgccgtctggataccttgtgtgaactgaacgtcatggaacaggtgtataacctgggccactccaccattatgcaatcagcgtggaaacgcgggcagaaagttaccattcacggctgggcctatggcattcacgacggcttgctgcgtgatctggatgtcacagcgactaaccgcgaaacccttgagcaacgttaccgtcacgggatttccaacctcaagctgaaacacgccaaccacaaataaaaatgccatgccggatgcaacacatccggcaacttcacacttactcgtccagcagaatcactttgccgatatacggcagatgacggtaacgctgtgcgtaatcaatgccgtaacccaccacaaactcatccgggatcgagaaaccgataaattctaccgggacgttcacttcacgacgggacggtttatccagcagcgtacaaatcgccagcgacttcggttcgcgcaggcttaagatctcacgcactttcgacagtgtattccccgagtcgatgatatcttcaacaatcagcacgtccttgccacggatatcttcatccagatctttgaggattttcacatcacgggtggtggacatgccgctaccgtagctggaggcggtcataaagtcgacttcatgagatacctgaacttcacggcacaggtccgccataaacataaatgagccacgcagcagaccaaccagcaccatatcgctgccgctgtctttgtaacgctcagtaatctgacgacccagttcggcgatacgcgctttaatctccgcttcggggatcattacttctacagtatgtttcatatctctaaccatatgatttaaaaacaaatcacttcgcacgggcaggttttggcaccgcaacaaagcgcaagacacgcagtataccagtaaaactattcattcgcggaatctgttaataaagctcgaattgtgatgacgatcacacatgttaaaacctataattaattgctactaaaatattaatgaattgaaatggtgtccctttatggcaattaacaatacaggctcgcgacgattactcgtcacgctaacagccctttttgcagcgctttgcgggctgtatctactcattggcggaggctggctggtcgcgattggcggctcctggtactaccctatcgctggtcttgtgatgctcggcgtcgcctggatgctgtggctcagtaaacgtgccgcgctttggctgtacgcagccctgctgctcggcaccatgatttggggcgtctgggaagttggtttcgacttctgggcgctgactccgcgcagcgacattctggtcttcttcggcatctggctgatcctgccgtttgtctggcgtcgcctggtcattcctgccagcggcgcagttgccgcactggtggtggcactgctgattagcggtggtatcctgacctgggccggatttaacgatccgcaggaaatcaacggcaccttaagcgccgatgccacacctgccgaagcaatctcccccgttgccgatcaggactggcctgcctatggtcgtaatcaggaaggtcaacgcttttcacctctgaaacaaattaacgccgataacgttcacaagctgaaagaagcctgggtgttccgtactggcgatgtgaagcagccgaacgatccgggtgaaatcaccaatgaagtgacgccgattaaagtgggcgacaccctttacctgtgtaccgctcaccagcgactgtttgcgctcgatgccgccagcggcaaagagaaatggcattacgatcctgagctgaaaaccaacgagtctttccagcacgtaacctgccgtggcgtctcttatcatgaagccaaagcagaaacggcttcgccggaagtgatggcggattgcccgcgtcgtatcattcttccagtgaatgatggtcgcctgattgcgattaacgctgaaaacggcaaactgtgcgaaaccttcgccaataaaggcgtgcttaatctgcaaagcaatatgccagacaccaaaccgggtctgtatgaaccgacttcgccaccgattatcaccgataaaaccatcgtgatggcaggttcagttaccgataacttctcaacccgcgaaacgtctggcgtgatccgtggttttgatgtcaacaccggggagctgctgtgggcttttgatccgggcgcgaaaaatccgaacgcaatcccgtctgacgaacacacctttacctttaactcgccaaactcgtgggcaccagcggcctatgacgcgaagctggatctggtgtatctgccgatgggcgtgaccacgccggatatctggggcggtaaccgcacaccggaacaggaacgttatgccagctcgattctggcgctgaatgccactaccgggaaactggcgtggagctaccagaccgttcaccacgacctgtgggatatggatcttccggcacagccgacgctggcggacatcaccgttaatggtcagaaagtgccagttatttacgctccggcgaaaaccggcaacatttttgtgctcgatcgtcgtaatggcgaactggtggttccggcaccggaaaaaccggttccccaaggtgctgccaaaggcgattacgttacccctactcaaccattctcggaactgagcttccgtccgacgaaagatttgagcggtgcggatatgtggggagccaccatgtttgaccaactggtgtgccgcgtgatgttccaccagatgcgctatgaaggcattttcaccccgccatctgaacagggtacgctggtcttcccgggtaacctggggatgttcgaatggggcgggatttccgttgatccaaatcgtgaagtggcgattgccaacccaatggcactgccgtttgtttcgaaactgatcccgcgtggtcctggtaacccgatggagcagccgaaagatgccaaaggcacgggtacggaatccggcattcagccacagtacggtgtaccgtatggtgtcacgctcaacccgttcctctcaccgtttggtctgccatgtaaacagccagcatggggttatatctcggcgctggatctgaaaaccaatgaagtggtgtggaagaaacgtattggtacgccgcaggacagtatgccgttcccgatgcctgtaccggtgccgttcaatatgggtatgccgatgctgggcgggccaatctccacggcgggtaacgtgctgtttatcgccgctacggcagataactacctgcgcgcttacaacatgagcaacggtgaaaaactgtggcaaggtcgtttaccagcgggtggtcaggcgacgccaatgacctatgaagtgaatggtaagcagtatgtggtgatctccgcaggcggtcacggttcatttggtacgaagatgggcgactatattgtggcttatgccctgccggatgatgtgaagtaagacttgctcagattgctgacaacgtgcgcgttgttcatgccggatgcggcgttaacgccttatccagcctacaaaattgtgcaaaatcaatggattgcacaggtagcgtaggcctgataagcgtagcgcatcaggcagatttgcgtttgtcatcagtttaatgcccggagagatccgggcatatttccgaatacggtctttttataccgtaaaccctaacatcatccccgtatcttcatgctccagcagatggcagtgcgccatataagcatgttctttcggtgcatcgtgattaaacttcaccagcacttcgctgacattaccttctaccttaacggtatctttccagcc

SEQ ID NO: 299 - DNA, 12450 bp, Escherichia coli
  source 1..12450: mol_type = genomic DNA
agggagaggtattttcagttgatctggattgttaaattcatataatgcgcctttgctcatgaatggatgccagtatgtagtgggaaattataaatattgaaatagtccaactacttctttattaccaaaaatgagtatctgaattttaatattgcattcttgcgtgattatctcctgagtttgacttgtgattacctttttaaggtatttagcgtaactgtttttgagcgagcatcagaggtaaagataatcttcttgatagtgatgtgggatgttatacgtatggcatcgctgatgtttatggttaccccttatgtgtgctcaggaaccgacaggtaatcactcatactgaacagcgataaaagataaaggtgtgttcatgaattcatgtgattttcgtgtttttctgcaagagttcggtacaacggttcatttgtcattgcctggtagcgtatccgagaaagaacgactgctactcaagctgctgatgcagggaatgtctgtaacagaaatatcacagtacagaaatcgcagtgcaaagacaatttcacatcaaaagaaacagctctttgagaaactggggattcagagcgatattactttctggcgcgatattttctttcagtacaatccggagatcatatccgccacggggagtaatagtcacagatatattaatgataatcactatcaccatatcgtcacgcctgaagccatcagtctggcgttggaaaaccacgaattcaaaccgtggatccaaccggttttctgcgcgcagactggggtactgacgggctgtgaggtgcttgtccgctgggaacatccacaaacgggaattatcccaccggatcagtttattcctctggcggagtcatctggtcttatcgtcataatgacccgccaactgatgaaacagactgcggatattctgatgccggtaaaacatttgctgccggataatttccatattggtatcaacgtctcggcgggttgttttttggccgcgggatttgaaaaagaatgcctgaacctggtcaagaaattaggaaacgataaaatcaaactggttctcgagctaacggaacgtaaccctattccggtaacgccagaagccagagcgatatttgacagccttcatcagcacaacattacctttgcgctggatgactttggtacgggttatgcgacctatcgttacttgcaggcgttcccggtcgattttattaagatcgataagtcatttgtgcaaatggcgagtgtcgacgaaatctccggtcatattgtggacaatattgtcgaactggcgcgtaagcctggtctgagtatcgtagcggaaggggtagaaacccaggagcaggcggatttaatgatcggtaaaggcgttcactttttgcagggctatttgtactccccgccagtaccgggtaataaatttgtttctgaatgggtaatgaaagctggtggttgatgtaaaccgctattcacagcgcatcgggaggttggcagcgattaattctcccgatgcagtaaatcctgatagatccccgttaatatgccatttggcgcaaattgctttttaatccactgcgtcacctgaccggtggcagagtgctgggttgcgagtaacatgcgtgaatcctggcgcgggttatggatttgtcgggtaaccagcaaggattgcgccatcgcctcacggaccatgtaatccggcaaaaaaccaattccttcacctaaaatctggcactgacatttggtgttgaaatctggcaccagaattgactcctgcccatgcagcaaccagcccacttttttattaatcgtatgtgcggtgtcctccaccataatattagggtagagacgcagttggctttcggcgatgggttccggcacaaaggctaacgggtgatccggggcgatagcaaaagcccagcgaatcgcgccaatttcagtgtaatcaataccgccgccgtccagtagtgtatcgggtgcgccgatggcgatattggcctgattattaataatcgcatcccagacgccgttatacacttcggtcgtcacggtaatctggcaggtaggaaactgctttttcagcacctgtaataagcgcgcggtgtgtttgggcgtataaagcagctgattaatacaaatgcgcacacgcgcttctatgccctgcgaaatagtatctatgctacgtttgatggcataaaaatcattcagcaggtcggtagctttgcggaaaaaataacgcccggactccgttaactcaatgctgcgggtactgcgagtgaacagcaccacatccagccccgtctccatacgcttaatggtgtagctaatggcggaagtggttaaacccaactcttctgcggctttactgaagctgccaaaacgcgcagcggtagtaaatgccaacaggttttcttcggtaaaaattgagttcattaaaccattctcgccattatctactatgaatttctccagctatgactgtagaggtatcggttaaagatagataatcatttttgaataacttttaatacccgtcgcgtttagtcgtcgcttcgcttaatttttgtccaccatattctgaaattatccccacgcagttacccgccagaaaacccagtaacgtcaccgtccagttcatcccgctggcaaaaaacagcgtcatgccgagaaagccaccgggaataaatgacagtaaccagaaacgcccttgccagaccactaccgctgagaaaggcacggtagtaatcacgctcgcccagaacccagaaatcccactcaccgaggccagccaaccggcagccagcgcggcgaaaaatgcccacaccatcccggaataattaaccgccagacttctgataaaccccgatttaccgccgcctgcggcataaaaactgcaaaaggcgacgaagccaatggttcctaataattcccatccctgagagagcccgacatgtgaagacactaactgccaaagccctgcacaaataccgacggtgacacccgttgccgtgagtccgttcatcttgttcccctctggttagacatggacgaaagctactcttacatgtgcagactatagagaaataaaaactgattgagtgaaagggtatcgggtcaaagaaacaaatattgcactaccgcacactgcgaaaagattgttgaacatctttcaacaaaaaggcgaaatacggcgaattaaatttaagcgggttcttttatcagattatcgttgctattctcaattcatcgaaaacagccacaaaaaccaggggaatgtgaatgacgataaaaaatctacctgccgactatttattggctgcacaacagggcgatatcgataaagtaaaaacctgtcttgcgctgggtgtcgatattaatacctgcgatcgccaggggaaaacggcaattacgctggcaagtttatatcagcaatatgcttgcgttcaggcattaattgatgccggagcggatattaataaacaagacctgacatgtttaaatccttttttaatgagctgtctgaacggtgatttaacgctgctacgaattattttaccggctaaaccagaccttaattgcgtcacccgttttggcggtgtcggcctgacgcctgcctgtgaaaaaggccatttaagtattgtaaaagagcttttggcgcatacggaaattaacgttaaccagaccaaccatgttggctggacaccgctgctggaagcgattgtgcttaatgatggcgggattaaacagcaggcgattgtccagttattgctggaacacggtgccagcccgcatctgaccgataaatatggcaaaacgccactggaactggcgcgggaacggggctttgaagagattgcgcagttactgattgccgcaggtgcataaaccgggaggcttgctatcaacacaccagaaagacggtgtgtgtgggcgctaactgcggatgcggattttctggcgcagcgggggcaaggacaggttgaacaggtctttgccagagcggtaaatatcgcactcccggctcgccagcagttgctgacgctgctttgtgaagagtacgacaatgcgccaaacagttgtcggttggcactcactcactttaatggtctgttccggcatggtgataaggttcagtttgacgagcaaggcattacggttggtcaacatcttcatatagagatgagtcgttgtcggcgttggctgtccccaaccttgcaaatgaccgctgtgaattttcaccttatcgcctggcaacagtggcacgacattattcatcagcacctgggggaaaatgaaaccctgtttaattatcgcggcgataatccgttttatcaggcgttaaataaagaattacatattaaacgacgggcagttattcaggccgtaaacgataaacaaaatatcgcctcagcggtcgccagtatgatggggttagggattggccttacgccatcagccgacgattatttaacaggtctggcgcttgttttatttattcccgggcatccggcggaaaaatacaaagaggaattttatctcggtctgcaacgcggcagaaataataccacattattaagtgctataacgctggaagccgcattacaacaacgttgccgggaaaatattcatagttttattcacaacattatttatgacatccctgggaacgcaactcaggcaatagaaaaaattaaacatattggctccagttccggctgcgacatgctgtatggcatggccgatggttgtgcgctgagccaaacctacggagggaattatgtcagttaaaatagtcattaaaccgaatacctattttgattctgtctcgctgatgtctatctccacgcgtgcaaataaactcgacggcgtcgagcaggcatttgtggcgatggcgaccgaaatgaacaaaggtgtgctgaaaaatttaggactgctgacgccggagctggaacaggcgaaaaacggcgacctgatgattgtcatcaatggtaaatcgggtgcggacaacgagcagttgctggtggagattgaagaactgttcaacaccaaagcgcaaagcggctcgcacgaggcgcgttacgccactattgccagcgccaaaaagcatatcccggaaagtaacctggcggtgatttcggtcaacggtctgtttgccgctcgcgaagcgcgtcaggcgctgcaaaacgatctcaacgtgatgctgttttccgataacgtctcggttgaagatgaactggcgctcaaacaattggcccatgaaaaagggctgctgatgatggggccggactgcggcacggcgattatcaacggcgcggcgctctgctttggtaacgccgtgcgtcgcggtaacatcggtattgttggcgcatccggcaccggcagccaggagctgagcgtccgcattcatgaatttggtggcggcgtttcacaactgattggcaccggcgggcgcgacctgagcgagaaaatcggcggcctgatgatgctcgacgccatcgggatgctggaaaacgatccgcaaactgaaatcattgtgcttatctccaaaccgcccgcgcctgcggtggcccgtaaagtgctggaacgcgcgcgcgcctgccgcaagccggtggtggtctgcttcctcggtcgcgttgaaacgccggtggatgagcaggggctacagtttgcccgcggcagcaaagaggcggcgctaaaagcggtgatgctctccggcgtgaaacaggaaaatctcgacctgcatacgcttaaccagccgttgattgctgatgtgcgtgcgcgtctgcaaccgcagcagaaatacatacgtggcctgttctgcggcggcacgctgtgcgacgaaaccatgttcgcggtgatggaaaaacatggcgatgtctacagcaacattcagcccgatcctgaattccgcctgcaagatatcaaccgcagcatcaaacacaccttcctcgactttggcgatgacgacttcaccaacggcaagccgcatccaatgattgaccccaccaaccgcatcagtcgcttgatcgaagaagcgcgcgatccagaagtggcggtgatcgtgatggattttgtgctcggatttggatcgcatgaagatccggtcggctccaccatcgaggcgatcaaagaagcgaaagcgatcgccgccgccgaaggacgcgagttgatcattctcgcctatgtgctgggcaccgatctcgatacgccatcattagaacaacaaagccagatgctgcttgatgccggagtgattctggcgagcagcagcaccaataccggattgctggcgcgtgaatttatctgcaaaggggaggaagcctgatgagccagtcactgtttagccaaccgttgaacgttattaacgtcggtatcgccatgtttagcgatgacctgaaaaagcagcatgtagaagtgactcaactcgactggacgccgccggggcagggcaatatgcaggtggtgcaggcgctggataacattgccgattcgccgctggcagacaaaatcgccgccgctaaccagcaggcgctggagcgcattatccagtcgcatccggtgctgattggttttgatcaggcgattaacgtggtgccgggcatgacgccgaaaaccattcttcacgccgggccgccgatcacctgggaaaaaatgtgcggcgcgatgaaaggcgcggtcaccggggcgttggtgttcgaagggctggcgaaagatctcgatgaggcgactgaactggcggcctccggggagatcaccttctcgccgtgccacgaacacgactgcgtgggatcgatggcgggcgttacctcggcctcgatgtttatgcacatcgtgaaaaacaaaacctacggcaacatcgcttataccaatatgagcgagcagatggcgaagattttgcgtatgggtgccaacgatcagagcgtgatcgaccgcctcaactggatgcgcgatgtgcaggggccaatgctgcgcgacgcgatgaaaattatcggtgagatcgatctgcgcttaatgctggcgcaggcgctgcatatgggcgatgagtgccataaccgcaataacgccgggacgacgctgctgattcaggcactgacgccggggatcattcaggcaggctattccgtcgagcaacagcgcgaagtgttcgagtttgtcgccagcagcgactacttctccggcccgacgtggatggcgatgtgtaaagcggcgatggatgcggcgcacggcatcgaatacagcaccgtggtcaccaccatggcgcgtaacggcgtcgagttcggcctgcgggtcagcggcctgccggggcagtggtttaccggcccagcgcagcaggtcatcggcccgatgtttgctggttataagccggaagattcggggctggatatcggcgacagcgccatcacnnnnnnnnnnacagaaacctacggtattggcgggtttgccatggcgaccgcgcctgcaatcgtcgcactggtgggcggcacggtggaagaggctatcgatttctcccgtcagatgcgcgaaatcacccttggcgaaaaccccaacgtcaccattccgctgctcggttttatgggcgtgccgtcggcaatcgacatcacccgcgtgggtagcagcggcattctgccggtgatcaacaccgccatcgcccataaagatgcgggcgtcggcatgattggcgcgggcattgtgcatccaccattcgcctgcttcgagaaagccattctcggctggtgcgaacgttacggcgtctgacttacatgtttatgccggatgcggtgtgaacgccttatccggcctacggatggcccgagaattgtaggcctgataagcgtagcgcatcaggcagtctggcgttggtcataacctaatcaccctctgtagcggacataacaacatgaaagagcttgtggtcgttgccattggtggcaacagcattatcaaagataacgccagccagtcgattgagcatcaggcggaggcggtgaaagccgtggccgatacggtgctggaaatgctggcttccgattacgacattgtgctgacccacggtaacgggccgcaggtcgggctggatttacgccgtgcggagattgcccacgagcgcgaagggctgcccttaacgccgctggcgaactgtgtggcagatacgcagggcggcatcggctatctgatccaacaggcgctgaataaccggctggcgcgtcacggcgagaaaaaagccgtcaccgtggtaactcaggtggaagtggataaaaacgatccaggttttgcccatcccaccaagcccattggtgcattcttcagtgaaagccagcgtgacaaactacaaaaggcaaaccctgactggtgttttgttgaagatgccggacggggctatcgccgcgtggtcgcctcgccggaaccgaaacgtattgtcgaagcacccgccattaaggcgctgatccaacaaggttttgtcgtaattggcgcgggcggcggtggaattccggtagtgcgtactgaagcgggggattaccaaagcgtggacgcggttattgacaaagatctctctaccgcgctgctggcccgtgaaattcacgccgacattctggtgatcaccaccggcgtcgaaaaagtctgtatccactttggtaaaccgcagcagcaggcgctggatcgggtggatattgccaccatgactcgctatatgcaggaagggcattttccgcccggcagcatgttgccaaaaatcatcgccagcctgacgttcctggagcagggcggcaaagaagtgattatcaccacgccggaatgcctgcctgcggcgctgcgcggtgaaacgggcacccatattattaaaacgtaaggacgtaggatgaaagaaagcaatagccgccgtgaatttctgagccagagcggtaagatggtcaccgccgccgcgctgtttggtacctctgtgccgctcgcccatgcggcggtagctggcaccctaaactgcgaagcgaacaacaccatgaaaatcactgacccgcattactatctcgataacgtgctgctggaaaccggttttgactacgaaaacggtgtggcggtgcagacccgcacggcgcgccagaccgtggagattcaggacggcaaaattgtcgccctgcgcgagaacaagcagcatccggacgccacgctgccgcactatgacgctggcggtaagttgatgctacccaccactcgcgacatgcatattcatctcgacaaaaccttctacggcgggccgtggcgctcgctcaatcgtccggcaggcaccactatccaggacatgatcaaactcgagcagaaaatgctgccggagttacaaccgtatacgcaggagcgggcggaaaaactgatcgatctattgcagtcgaaaggcaccaccattgcccgcagccactgcaatatcgaaccggtttccggcctaaaaaatctgcaaaatttgcaggcggtgctggcgcggcgtcaggcgggcttcgagtgtgaaatcgtcgccttcccgcagcacggtttgctgctgtcgaaatcggaacccttaatgcgcgaagcgatgcaggcgggtgcgcattacgtcggcgggctggacccgaccagtgttgatggcgagatggaaaaatccctcgacaccatgtttcagattgcgctggactacgacaaaggcgtcgatattcacctgcatgaaaccactccggcaggcgtggcagccatcaattatatggttgaaacggtagagaaaacgccacagctgaagggcaagctgaccatcagtcacgcctttgcgctggcaacgctcaacgaacaacaggtagatgaactggcgcaccggatggcggcgcagcaaatttctatcgcctcgacggtgccgattggcacgctgcatatgccgctcaaacagttgcacgacaaaggcgtaaaagtgatgactggcactgacagcgttatcgaccactggtcgccttacggcctgggcgacatgctggaaaaagccaatctgtacgcgcagctctatattcgtcctaacgaacagaacctctcccgctcgctgtttttagccactggcgatgtattgccgctcaacgaaaaaggcgagcgcgtgtggcccaaagcgcaggatgacgccagttttgtgctggtggacgcctcctgttccgccgaggcggtggcgcgtatctcgccgagaaccgcaacgttccataaagggcaactggtgtgggggagtgtggcaggttgatgcgcatttgaaacgcctgcaacggtgaatagtaagagatttaagccccagggagtggggcaacctgaatatgagtgtgtcggcagaaatggatattatctttgaggaatatgcccttattgacgttgtgtagataactatttgtctacgtgaaaagatcatcagttttgccgattttagtcttttacggatagcaaatatcacacttacaggtgctcgccttatggggaacgttgctgctttgtttcattcaggctcgcggcatgttggggctggatcgggtggtttaaatattggctatattcaatggacgcgttttgccgcgatgacatatcaggcatcgccaaatacacatagctaatcaggagtaaacacaatgaagatcaaagctgttggtgcatattccgctaaacaaccacttgaaccgatggatatcacccggcgtgaaccgggaccgaatgatgtcaaaatcgaaatcgcttactgtggcgtctgccattccgatctccaccaggtccgttccgagtgggcggggacggtttacccctgcgtaccgggtcatgaaattgtggggcgtgtggtagccgttggtgatcaggtagaaaaacatgcgccgggcgatctggtcggtgtcggctgcattgtcgacagttgtaaacattgcgaagagtgtgaagacgggctggaaaactactgtgatcacatgaccggcacctataactcgccgacgccggacgaaccgggccatactctgggcggctactcacaacagatcgtcgttcatgagcgatatgttctgcgtattcgtcacccgcaagagcagctggcggcggtggctcctttgttgtgtgcagggatcaccacgtattcgccgctacgtcactggcaggccgggccgggtaaaaaagtgggcgtggtcggcatcggcggtctgggacatatggggatcaagctggcccacgcgatgggggcgcatgtggtggcatttaccacttctgaggcaaaacgcgaagcggcaaaagccctgggggccgatgaagttgttaactcacgtaatgccgatgagatggcggctcatctgaagagtttcgatttcattttgaatacagtagctgcgccacataatctcgacgattttaccaccttgctgaagcgtgatggcaccatgacgctggttggtgcgcctgcgacaccgcataaatcgccggaagttttcaacctgatcatgaaacgccgtgcgatagccggttctatgattggcggcattccagaaactcaggagatgctcgatttttgcgccgaacatggcatcgtggctgatatagagatgattcgggccgatcaaattaatgaagcctatgagcgaatgctgcgtggtgatgtgaaatatcgttttgttatcgataatcgcacactaacagactgaaaaaattaataaatacgctgtggtttaacatattaacttcgctctccacttaactttttagttaaggagagcgaaataatatcaaagtagcagtaaaacctataacgtaaattcaaattgttaaattaactccctccagtacacaatacttcacacgttagttatgagcgatttctgatagtgcctggtttaatcagagctttattatctgcgacgtttatttttatttaagagagatcgcgatgatatcattaaaagctccgcacaataatttgatgccatatacgcaacaaagcatacttaatacggttaaaaacaatcagttaccagaggatatcaaaagctccctggtttcctgtgtcgatatattcaaggttttgattaaacaatattatgattatccttatgattgtcgtgatgatttagtcgatgacgacaaactcattcatctcatggctgccgtacgagactgtgagtggtcagacgataacgcactcaccataaatgtgcagtttaatgatttccctggattttatgactggatggattaccctgatcacccggttaagtttgtttttcgcatacttgaaaatcaaaaagggacagtttgggtatatgaccaggatgatgcgtttcttgatattaaagcaaatgtgcaggctggacgctttaccgggcttaagaaattagttcagtttatcgattcagtgcgaacagattgcaaatgtattcttcttgaacaccatatgcctttgctgagacttttccctaaagg

SEQ ID NO: 300 - DNA, 12385 bp, Escherichia coli
  source 1..12385: mol_type = genomic DNA
atgggccagaattgctgaccagttatcgtgagagtaattcatcggcacgttaaatcatatcaggcgtaataccacaacccttaagttagcgcttatgggagtgatccccgccactttacaggtgctcgcatatcttcaacgcaccctatttttacccaggcctgcccacgggcaggcttttggggaggttagcgggtcaggtcgtcaaaaaacttcttcacaccatcaaagaagctctttgagcgcgggctgttgtgctcgccggttgggccaccgaagctttcttgcagctcttgcagcagctgtttctgcttctcgttcaggcctaccggtgtttcgacgacaacgcggcacagtaaatcaccctgtgcgccaccgcggacagacttgacgcctttaccgcgcatacggaacagcttaccagtctgggtttcgccaggcactttcagtttgacgcgaccatcaagggtcggtacttcgatttcgccacccagcgccgccatagcgaagttgatcgggacttcgcaatacaggttgttgccttcacgctcgaaaatcgggtgctgtttaacctgaacctgaacgtacagatcgcctgccggtgcgccatgctcgcccgcttcaccttcgcccgcaagacggatgcggtctccagtgtccacccctgccgggattttaacggacagcgttttgctgcgctcaacacgaccatgaccatgacatttgttgcacggatctttgatcagcgtaccgcgaccctgacagtgtggacaggtctgctgcacggcaaagaaaccctgacgcatctgcacctgaccagaaccatgacaggtcggacaggtctgcggctgtgtacctggttttgcaccgctaccgtggcaaacgtcacactcttccagagtcggaatgcggatctctttggtcacgccacgtacagcttcttcgagggtgagctccatgttatagcgtaaatcagcaccgcgcgccgcacgttgacgaccacgtccgccgccaaaaatatcgccgaaaacgtcaccaaaaatatcgctgaagtctgcgccgccgccaaaaccgccgccgcccataccaccttgctcaaacgcagcatgaccatactgatcgtatgccgcacgtttttgcgagtcggtcagaacttcataagcttccttgatctctttaaatttcgcctcggcctctttgtcaccctggttacggtccgggtggtatttcatggccaggcgtttgtaggcctttttgctttcacgctcttnnnnnnnnnnctcttccgctgttttggaaacgcctaaaatctcgtaataatcttgcttagccatcttttttaaattgcccctagatgaatgcacgggcggagaggaaattccccttcgcccgtgtcagtataattacccgtttatagggcgattattttttgtctttgacttcttcaaattcagcgtcgacaacatcgtcatctttcgcgttgtttgcagaagcatcagcaccggcagtctgctgctgggcatgttgctgctgggcgatttcaatcagtttctgggaaacctgtgccagctcctgcattttcgcttcgatagcggctttgtcttcacctttcagagcagtttccagtgcagtcagtgcagactcgatagcagttttgtcgtcagccggcagtttgtcgcctgcttcttcaacctgcttacgggtgctgtgcagcagatggtcgccctggttgcgagcctgtaccagctcttcaaacttacggtcagcttcggcgttagcttctgcgtcgcgtaccattttctggatttcatcttcgttcagaccagaagaagccttgatggtgatcttctgctctttaccgctgtttttatctttcgcggaaacgtgcaggataccgtcagcatcgatatcgaaggtaacttcgatctgcggcatgccgcgcggtgccgggttgataccatccaggttgaactgacccagagatttgttatcagccgcacgtttacgttcaccctgcagcacatggatggttaccgcagactggttgtcttcagcggtagagaacacctggctgtgcttggtcgggatagtggtgtttttcgcgatcagcgtcgtcatcacaccgcccatggtttcgatacccagagacagcggggtaacgtccagcagcagtacgtctttcacgtcaccagtcagaacaccaccctgaacagcagcaccgattgctacagcttcgtccgggttaacgtctttacgcggctctttaccaaagaactcagcaactttcttctgaaccattggcatacgagtctgaccaccaacgaggataacgtcgtcgatatcagatacggacaggccagcgtcctgcagtgcaactttcagcggctcaatggaacggtttaccagatcttcaaccaggctttccagtttcgcacgagtcactttgatgttcatgtgtttcggaccggtcgcatctgcagtgatgtacggcaggttaacgtcggtctgctgagcggaagacagttcgattttcgctttttctgccgcttctttcaggcgctgcattgccagcggatcgttgcgcaggtcaatgccctgatctttcttgaattcttcaaccaggtagttgatcagacggctgtcgaagtcttcaccacccaggtgggtatcaccgttggtagccagaacttcgaaggttttttcgccgtcaacttcgtcgatttcgataatagaaatatcgaaagtaccaccacccaggtcataaaccgcgatagtacggttgccagtacctttgtccagaccgtaagccagcgcagctgcggtcggttcgttgatgatacgttttacttccagaccagcgatacggcctgcgtctttggttgcctgacgctgagcatcgttaaagtatgccggtacggtgataacagcttcagttaccggttcacccaagtaatcttcagcggttttcttcatttttttcagcacttcagcagaaatctgcggcggtgccattttctggcctttaacttcgacccatgcgtcgccgttatcagcagcaataattttgaacggcatgatggaaacatcacgctgtacttcttcgtcctggaagcggcggccaatcaggcgtttaatcgcaaacagggtgttttgcgggttcgtcactgcctgacgtttagccggctgaccaaccagagtttcaccatcctgggtataggcaataatagaaggcgtggtgcgatcgccttcggcgttctccagcacgcgaggagtggtgccatccataatcgctacacaagagttggtagtacccaggtcgataccaattattttacccatctaaacgtctccactatatattcggtcatcatgtggttgtgagtctgtaataggggcgaaacgtctggtttcaactgcccaatttcatttttttgcagactcactcactgcggttgactactaaatggggtcgtaacccacgtcatcaagggggagatgcaaaaattttttgtgcttttgcgcagaaatttcgcgatatagcaggacaagacgtgaaactgacagcaattttattcatataaagaatgaatcgcagccaagacattcatcaaaaaattgtaataaaaagaaaacattacgcacctgaatcttctctttatcagcagtaaactagtgggtatccatccccctacctctccccactaagagaatccttatgaaatccgtttttacgatttccgccagcctggcgattagtctgatgctgtgctgcacggcgcaggcaaacgaccataaaatcctcggcgtcattgcgatgccacgtaacgaaaccaacgatctggcgctaaaacttcctgtttgccgaattgttaaacgcatacaactctctgccgaccatggcgatttacagttaagcggtgcatcggtttatttcaaagccgcccgtagcgccagtcagagcctgaatattccttcagaaataaaagaagggcaaaccactgactggatcaacattaacagcgataacgacaataaacgctgcgtctcaaaaatcaccttttccggtcatacggtgaactcatcggatatggccacgctgaaaattatcggcgacgactaacgccagaatatagaagccacaaaaaatgaatgttaattacctgaatgattcagatctggattttctccagcattgcagtgaggaacagttggcaaatttcgcccgattgctcacccataatgaaaaaggcaaaactcgcctctccagcgtactgatgcgcaacgaactgtttaaatcgatggaagggcatcccgagcaacatcgccgcaactggcagctgattgctggagaattacagcattttggtggcgatagtatcgccaacaaactgcgcggacacggtaaattgtatcgggccattttgctcgatgtttcaaaacgattgaagctgaaagccgacaaagagatgtctacgtttgagattgagcaacagttactggaacaatttctgcgtaacacctggaagaatatggacgaggaacataaacaggagtttctgcacgcggtcgatgcgagggtgaatgagctggaagagctgctgccgctgctgatgaaagacaaattattggcaaaaggcgtgtcgcatttgctttccagccaactgacccgcattttacgcacccacgcagcaatgagcgtacttgggcatggtttgctgcgcggcgcggggctgggaggccctgtaggtgcggcactaaatggggttaaagcggtcagcggcagcgcctatcgcgtgacgattccagccgtactgcaaatcgcctgcctgcgccggatggttagcgccactcaggtctgataccggaaaccggggaaaattttcattttcccctcaaaagatcgtagacactgccccactggctgattattatgccgcgccctgaaaacactacagttattcagggaaattatttcaccattcattcgatgatgatttttgaggaattatgggcaacactaagttggctaatccggcaccgctgggcctgatgggcttcggcatgaccaccattctgcttaacctgcacaacgtgggttatttcgctctggacggtattattcttgccatgggcattttctacggcggcatcgcgcaaatttttgctggtctgctggagtacaaaaaaggcaacactttcggtttaaccgcattcacctcttacggttctttctggctgacgctggttgcgattctgctgatgccgaaactgggtctgaccgatgcgccaaatgcacagttccttggtgtctatctgggtctgtggggcgtatttacgctgtttatgttcttcgccacgctgaaaggcgcacgcgttctgcaattcgttttctttagcctgaccgtgctgtttgccctgctggcgatcggtaacattgccggtaacgccgcaatcatccactttgccggctggattgggctgatctgcggtgccagcgcaatctatctggcgatgggtgaagtactgaacgagcagtttggtcgcaccgttctgccgattggtgaatcccactaattgttttgagatccccccgctcggggggatttttttattcgctaacgtcgcgtcttgcactcttcggtctgaatgctgcaaccacttccggtgccgtttcaacgtatggcccttccagcaactgaatgcagtacggtacgctggcaaaaataccgtgtaccacaacgttacccgcagcgtccttcacaccttccagcgtctctttaatagacttcggctgaccgggtaagttaaggatcagcgcctgtttgcgaatcacaccaacctgacgcgaaaggatcgcagttggtacaaaatgcaggcttatctggcgcatctgttcaccaaagccaggcatctcgcggtccgctactgccagcgtcgcatcgggcgttacgtcacgacgcgccgggccagttccgcccgtggtgagcaccagatggcaactcatttcatccactagctcacacaacgtttgctcgatgatcgcctgctcatcggggattaagcgggtttccagttcaaacggcgtggttagcgccgatgtcagccattcttccagcgcagggatgcctttatcctgataaacgccgctggatnnnnnnnnnngatggaaactaagccaatacgtaaagtattcatcaagatttttccgtttaaacagtctcgttaaacagaatgatacactgcgaagggagtgacagacaggcttcagaagaggtagcgtgaccgacttcccggtcacgctaagaatgattacagcagatcgccgatcattttttccagtttttcctggtcaatagcaaacttacggataccttccgccagtttatctactgccattggatcctggttgtgctgccacaggaactcggactcagtgatacgcgccggacgcgctttcacttcgccggtgtaagacagtttacgttcgatagccccttcgctctcagccagctctttcagcagtgccggtgcgatggtcagacggtcgcagcctgccagttccagaatttcgccgatgttacggaagcttgcgcccataaccacggtttcataaccgtgctctttgtagtactggtagatttcagatacagaaaccacgcccggatcttctgccggagcgtactctttcttatcggtattcgctttgtaccagtcaagaatacggccaacaaacggcgagatcaggaacacgcccgcttccgcacaagcacgagcctgagcgaaggagaacagcagggtcaggttacagttgatgccttctttttccagctgttctgcagcacggataccctgccaggtagaagccagtttgatcagaatacgatcgttgctaataccagcatcgttgtagagtttgatcaggcgttttgctttcgcaattgacgcttcagtgtcataggaaagacgcgcatcaacttcagttgagatacggcccggaaccagtttcaggatttccagaccaatatttactgccagtttgtcggtcgcgtccacgatctgctgcgcgcgatcgttgctctgctgtttcgcccaggcgacagcatcatcaatcaacttacggtattccggaatctgcgctgcgttaagaatgagagaagggttggttgtggcatcctgcggttgatacagcttcattgccgcgatgtccccagtgtcggccactacggtggtgtactgacgaagggaggtcaatttgtccgtcatgatagtatttctctttaaacagcttgttagggggatgtaaccggtctgccctgatgatatcacgacgcaacgtcagcgcaaccgccgacaagacggttatcgccaggcgagactgtttcggatttctgacactgcgttgatatcgcccgccatttttatacaaaacctcatgtatgctacgcagaagttatcaagtacctcgtagcgtatatacttcttaaacaattggtaacgtttacacaggaaagtcatcgcgaccggcaataagagggatatgcatgccagattttttctcctttattaacagcgtcctttggggatcggtaatgatttacctgctcttcggcgcaggttgttggttcacttttcgcaccggatttgtgcagtttcgctacatccgccagtttggcaaaagtcttaaaaatagcattcatccacagccaggcggtttaacctcatttcagtcattgtgtaccagtcttgcggcgcgcgtgggtagcggcaacctggccggcgttgcgctggcaattaccgccggtggacctggagccgtcttttggatgtgggttgccgcgtttatcggcatggcgacctcgtttgccgaatgttctctggcacaactttataaagaacgtgacgtcaatggacagtttcgtggcggaccggcatggtatatggcgcgcgggctggggatgcgttggatgggcgttctgttcgccgtctttttgctcatcgcctatggcataattttcagcggagttcaggcgaacgccgttgcccgcgccctaagtttttcttttgattttcctccgctggtgacaggcattattctcgctgtctttgctctgctggcaatcactcgcggtcttcatggcgtcgcccggctcatgcagggttttgtcccgttgatggcgataatctgggtactgaccagcctggtgatttgcgtaatgaatatcgggcaacttccccacgtcatttggtctatttttgagagtgcttttggctggcaggaagcggcaggcggcgcggcgggatataccttaagccaggcgattactaacggttttcagcgcagtatgttttccaatgaggcgggaatgggttctacaccaaacgcagcagcggcagcggcgtcctggcctccgcatccggcagcgcaagggattgtccagatgattggcatttttatcgacaccctggtcatctgtacggcaagcgccatgctgatattactggcgggtaacggcacaacctacatgccgctggaaggtattcagcttatccagaaggcgatgcgggtgctaatgggttcctggggtgctgagtttgttaccctcgtggttattctgtttgccttcagctccatcgttgccaactacatttatgccgaaaacaatctcttctttttacgcctgaacaaccctaaagcgatctggtgtttgcggatctgcaccttcgcaacggtcatcggcggcaccttgctaagtcttccgctgatgtggcaactggcagatatcataatggcctgcatggctattaccaatttgaccgccattttactgctctcgcctgtggttcataccattgccagtgattatctacgccagcgtaaactcggcgtgcgcccggtgtttgatccgttgcgttatccggatatcggtcgccagctttctccggacgcgtgggatgatgtttcgcaggagtaatcacaactatcgatcaactcattctctttttttgctaaagtcggcataaatttcctgcaaggactggatatgctgattcttatttcacctgcgaaaacgcttgattaccaaagcccgttgaccaccatgcgctatacgctgccggagctgttagacaattcccagcagttgatccatgaagcgcggaaactgacgcctccgcagattagcacgctgatgcgcatcagcgacaaactggcgggtatcaacgccgctcgctttcatgactggcagccagatttcacgccggagaatgcccgccaggcgattctggcgtttaaaggtgatgtctacaccggcttgcaggccgaaaccttcagcgaagacgatttcgattttgcccaacagcatttgcgaatgctttccggcttgtatggcgtactgcgcccgctcgatttaatgcagccttatcgtctggaaatggggatccgtcttgagaatgcccgagggaaagatctgtatcaattctggggagatatcatcaccaacaagctgaacgaggcgctcgcagcacaaggcgataatgtggtgattaatctggcgtcagatgattattttagatcggtgaagccgaagaaattgaatgccgagattatcaagccggtgttcctcgatgagaagaacggcaaatttaagataatcagcttctacgctaagaaagcacgcggtctgatgagtcgttttattattgaaaatcggctgaccaaaccagagcaactgactggttttaatagcgaaggttacttctttgatgaagcttcctccagcaatggcgaactggtgtttaaacgctacgagcagcgttaagtttgtagtcaatgccggatgcggcgtgaacgccttatccggcctacaaaagcatgcagattcaatatattgcagaattcacgtaggcctgataagacgcgccagcgtcgcatcaggcgctgaatgccggattgttacccggcatttgtcatttagcggtgatgtttgcctggaccatgaccgccgtgatgatcatgaggagctttcttatggtggcgcggcggtggcggcggtccgtgtgggtgccagcgattgcctcgccattcataatgttgtttccaccagccgtggtcgcgccagtgacctccatcccagtaatagccacgattatcacgatcgcctatctgtaattttactgacgggactaacgtaatttccgcagcctgtgctgccatgggagcgaccagaaccagggaaagtgcgagtacgatagattgcatctttttcacaggttactccttttatcattgcccgttatgggtcgatatccggagattacgcgatgagaacgacggttgttattctccgcaatcctaatctctaagttaccgcatttattgagaatttctcctttttccctgtcgtttttctccataatttcttcataaaaaagccgggctgcataaaagcaaacccggcctgattgagataatgaatagattttactgatgattcatcatcaatttacgcaacgcagcaaaatcggcgggcagattatgtgaaagcaagggtaaatcagcacgttctgccagctcttttggcagatccaacgtttcaccgagaatcgcttccacgctctctttaaatttcgccggatgcgcggtgccgaggaacaagccatattcgcctggattcaactggtcacgcagcgcacgatacgctacggcagcgtgcggctccgaggtgtagcccagttcttttaactcacgcattgtctgttgcgtggtttcatcatccacggctgcataacccagctctttcagttgccagattttgcggcggaacaactcttccacacgcggccagttgttcggctgactcacgtccatcgcgttggataacgtcgcctgagtcgctttgggtgaccactgaccgtcgtgcaggaaacgtggcacggtatcgttcacgttggtcacagcaataaaacgtttcaccggcagaccgagtgacttcgccagcagacccgccgtcaaatcgccgaagtttccgcttggcaccgagacaaccagctggttgcgcgcttcctgcggcagctgcgcaacagcttcaaagtagtagcaaatctgcgccagcaaacggctgatgttaatcgagttagctgagtttaaccccagcgccactttcagttcttcatcatcaaacgcctgcttcaccagcgcctgacaggcatcgaaatcgccgtcgatggcaacagtttcgatattgccgcccaacgtacagaacagtttttcttgcagtggactgattttgcctcgtggatagaggataaccactttcacattcggtaaaccgtagaaagcatgagccactgccgctccggtatcaccggaggtcgcggtcagaatggtcactggcttatcgcccgcaatatgggtcagcatttgtgccataaagcgaccgccgaaatctttaaatgccagcgttggcccgtggaacaattccagacaaccgacatcgctttcaacattggcgaccggagccgggaaggcaaacgccgcgcgcacgcgctcttccaggatttcctgcgggatttcatcaccaataaacgccgagaggatcttcgcactgcgggtgacaaaatccagcttcagcatctcatcaatttcagtcaggctgaattccggcaggtcatgcggaaaaaacagcccctgatttttgcccaacccctgggttacggcttgcgcaaagctgacctgctcgttgtgatctttcagattgtagagtttcatttagttttccagtactcgtgcgcccgccgtatccagccggcaaatatgaacaaaaccttcctgattttgcaggtagttcttacccaaccagtcggcaacgcgctgggcggtatccggcttgtcacatagagcgaacaaggtcgggccggagccggagataccgctcgctaccgcgccgatttccgcgaccgcctgccgcgcctgccggaagccaggcagtaaccgttcacggtagggttcagcgataacatctttcatcagcttcgcggcaagctcaggctgacgggaatagcaggcgtgaatgaagccagccagatgtcgcccgtgcgcaatgcaatcctggcggcgatactgcgccggtaaaatagccctggcttctgccgtcgagactttaatccccggatacgccagcacccacagccactcatcaaaccctggcacttgctggctgatgatgtcgttttcttcgatcatcaactgcataccaccaagaaaacacggtgccacgttgtcgtaatgaatgctgccggagattcgtccttccagctcgcccatcaaagccagcaaacgagtgtcattaagcggcttgccacagtgttcattcatcgccatcagcgc
